(19) United States
(12) Patent Application Publication
(10) Pub. No.: US 2009/0205063 A1
(43) Pub. Date: Aug. 13, 2009

(54) Plant polynucleotides for improved yield and quality

(75) Inventors: James Zhang, Palo Alto, CA (US); Frederick D. Hempel, Albany, CA (US)

Correspondence Address: MENDEL 2 C/O MOFO SF, 425 MARKET STREET, SAN FRANCISCO, CA, 94066, US

(73) Assignee: Mendel Biotechnology, Hayward, CA (US)

(21) Appl. No.: 11/632,390

(22) PCT Filed: Jul. 14, 2005
(86) PCT No.: PCT/US2005/025010

§ 371 Date: Dec. 17, 2008

Related U.S. Application Data
(60) Provisional application No. 60/588,405, filed on Jul. 14, 2004.

(51) Int. Cl. A01H 5/00; A01H 5/10; C12N 15/82; A01H 1/04

(52) U.S. Cl. 800/260; 800/295; 800/282; 800/290

(57) ABSTRACT

The invention relates to plant transcription factor polypeptides, polynucleotides that encode them, homologs from a variety of plant species, and methods of using the polynucleotides and polypeptides to produce transgenic plants having advantageous properties, including increased soluble solids, lycopene, and improved plant volume or yield, as compared to wild-type or control plants. The invention also pertains to expression systems that may be used to regulate these transcription factor polynucleotides, providing constitutive, transient, inducible and tissue-specific regulation.

### FIELD OF THE INVENTION

[0001] The present invention relates to compositions and methods for transforming plants for the purpose of improving plant traits, including yield and fruit quality.

### BACKGROUND OF THE INVENTION

### Biotechnological Improvement of Plants

[0002] To date, almost all improvements in agricultural crops have been achieved using traditional plant breeding techniques. These techniques involve crossing parental plants with different genetic backgrounds to generate progeny with genetic diversity, which are then selected to obtain those plants that express the desired traits. The desired traits are then fixed and deleterious traits eliminated via multiple backcrossings or selfings to eventually yield progeny with the desired characteristics. Hybrid corn, low erucic acid oilseed rape, high oil corn, and hard white winter wheat are examples of significant agricultural advances achieved with traditional breeding. However, the amount of genetic diversity in the germplasm of a particular crop limits what can be accomplished by breeding. Although traditional breeding has proven to be very powerful, as advances in crop yields over the last century demonstrate, recent data suggest that the rate of yield improvement is tapering off for major food crops (Lee (1998)). The introduction of molecular mapping markers into breeding programs may accelerate the process of crop improvement in the near term, but ultimately the lack of new sources of genetic diversity will become limiting. Additionally, traditional breeding has proved rather ineffective for improving many polygenic traits such as increased disease resistance.

[0003] In recent years, biotechnology approaches involving the expression of single transgenes in crops have resulted in the successful commercial introduction of new plant traits, including herbicide resistance (glyphosate (Roundup) resistance), insect resistance (expression of Bacillus thuringiensis toxins) and virus resistance (over expression of viral coat proteins). However, the list of single gene traits of significant value is relatively small. The greatest potential of biotechnology lies in engineering complex polygenic traits to fundamentally change plant physiology and biochemistry. Step change improvements in crop yields, nutritional quality, plant architecture and resistance to environmental stresses are expected using genetic engineering approaches. Engineering polygenic traits has proven extremely challenging. As a result, companies have turned to plant genomics to achieve control over polygenic traits.

[0004] In general most agricultural biotechnology research programs being presently conducted involve large-scale expressed sequence tag projects (EST sequencing), gene expression profiling, quantitative trait loci mapping (QTL mapping), and/or positional cloning of quantitative trait loci. Presently, only a few research programs are engaged in functional genomics programs that analyze the effects of gene over-expression and null mutants, particularly the systematical identification and functional characterization of plant transcription factors.

[0005] Increased lycopene levels. Lycopene is a pigment responsible for color of fruits (e.g., the red color of tomatoes). For most consumers an attractive, bright color is the most important component to a fruit's visual appeal. The initial decision to purchase a fruit product is most often based on color, with taste influencing follow-on purchase decisions. There are immediate aesthetic benefits to robust color in fruit. Consumers in the U.S. and elsewhere have a clear preference for fruit products with good color, and often specifically buy fruit and fruit products based on lycopene levels.

[0006] In addition to being responsible for color, lycopene, and other carotenoids are valuable anti-oxidants in the diet. Lycopene is the subject of an increasing number of medical studies that demonstrate its efficacy in preventing certain cancers—including prostate, lung, stomach and breast cancers. Potential impacts also include ultraviolet protection and coronary heard disease prevention.

[0007] Increased soluble solids. Increased soluble solids are highly valuable to fruit processors for the production of various products. Grapes, for example, are harvested when soluble solids have reached an appropriate level, and the quality of wine produced from grapes is to a large extent dependent on soluble solid content.

[0008] Increased soluble solids are also of considerable importance in the production of tomato paste, sauces and ketchup. Tomato paste is sold on the basis of soluble solids. Increasing soluble solids in tomatoes increases the value of processed tomato products and decreases processing costs. Savings come from reduced processing time and less energy consumption due to shortened cooking times needed to achieve desired soluble solids levels. A one percent increase in tomato soluble solids may be worth $100 to $200 million to the tomato processing industry.

[0009] Disease Resistance. Fungal diseases are a perpetual problem in agriculture. Fungal diseases reduce yields, increase input costs for producers and lead to increased post-harvest spoilage of fruits and vegetables. Significant post-harvest losses occur due to fruit rot caused by the fungal disease, Botrytis. A disease resistant tomato, for example, would reduce these losses, thus lowering consumer prices and increasing overall profitability in the industry. Additionally, reducing post-harvest spoilage could extend the possible shipping range, thereby allowing access to new export markets.

Improvements that May not be Achievable with Traditional Breeding Methods

[0010] Most agronomic and quality traits are polygenic, which means many genes control them. Polygenic traits are extremely difficult to manipulate by traditional breeding or current single gene genetic engineering approaches. Difficulties in manipulating polygenic traits include:
[0011] obtaining all the genes necessary in a single variety,
[0012] linkage between genes for the desired trait and nearby deleterious traits,
[0013] lack of sufficient diversity in the germplasm (the collection of plant genetic material that can be selected and combined by traditional breeding techniques) to allow introduction of the desired polygenic trait by traditional breeding techniques.

[0014] For example, high solid tomato varieties have been obtained by breeding, but they are commercially unacceptable because the genes that control solids content are tightly linked to genes that also cause reduced yields and poor viscosity, consistency, and firmness.

[0015] Traditional biotechnology approaches have failed to improve these traits, since complex polygenic control requires insertion of multiple genes. These techniques also suffered difficulties caused by complex feedback mechanisms and multiple rate-limiting steps in the pathways.

Control of Cellular Processes in Plants with Transcription Factors

[0016] Multiple cellular processes in plants are controlled to a significant extent by transcription factors, proteins that influence the expression of a particular gene or sets of genes. Transcription factors can modulate gene expression, either increasing or decreasing (inducing or repressing) the rate of transcription. This modulation results in differential levels of gene expression at various developmental stages, in different tissues and cell types, and in response to different exogenous (e.g., environmental) and endogenous stimuli throughout the life cycle of the organism. Because transcription factors are key controlling elements of biological pathways, altering the levels of at least one selected transcription factor in transformed and transgenic plants can change entire biological pathways in an organism, conferring advantageous or desirable traits. For example, overexpression of a transcription factor gene can be brought about when, for example, the genes encoding one or more transcription factors is placed under the control of a strong expression signal, such as the constitutive cauliflower mosaic virus 35S transcription initiation region (henceforth referred to as the 35S promoter). Conversely, various means exist to reduce the level of expression of a transcription factor, including gene silencing or knocking out a gene with a site-specific insertion.

[0017] Strategies for manipulating traits by altering a plant cell's transcription factor content can result in plants and crops with new and/or improved commercially valuable properties. For example, manipulation of the levels of selected transcription factors may result in increased expression of economically useful proteins or biomolecules in plants or improvement in other agriculturally relevant characteristics. Conversely, blocked or reduced expression of a transcription factor may reduce biosynthesis of unwanted compounds or remove an undesirable trait. Therefore, manipulating transcription factor levels in a plant offers tremendous potential in agricultural biotechnology for modifying a plant's traits, including traits that improve a plant's survival, yield and product quality.

[0018] Plant transcription factors are regulatory proteins, and therefore critical “switches” that control complex, polygenic pathways. Controlling the expression level of plant transcription factors represents a critical, yet previously difficult, approach to manipulating plant traits. In order to control transcription factor levels in plants, a “Plant Transcription Factor Tool Kit” (PTF Tool Kit) has been developed that makes it possible to investigate readily phenotypic effects due to the expression of specific plant transcription factors at different levels, at different stages of development, under different types of stress, and in different plant tissues. This capability may be made available to plant breeders merely by making specific crosses in a “combinatorial-like” manner between two sets of plants: one set genetically engineered to contain transcription factors and a second set engineered to contain specific promoters. Our “Two-Component Multiplication System” expresses the transcription factor under control of the engineered promoter in the progeny plant, providing the same effect as if each plant had been engineered with the specific gene-promoter combination. A plant “library” comprising tens of thousands of plant transcription factor-promoter combinations can therefore be investigated with minimal time and expense. The PTF Tool Kit technology can be used with a wide range of other commercially important fruit, vegetable and row crops. This innovative technology is expected to increase agricultural productivity, improve the quality of agricultural products, and translate directly into higher profits for farmers and agricultural processors, as well as benefiting consumers.

[0019] The sizable fraction of the 1,800 plant transcription factor genes found in Arabidopsis thaliana have been investigated using the PTF Tool Kit, and their utility in an active breeding program is presented herein.

### SUMMARY OF THE INVENTION

[0020] The present invention relates to compositions and methods for modifying the genotype of a higher plant for the purpose of impart desirable characteristics. These characteristics are generally yield and/or quality-related, and may specifically pertain to the fruit of the plant. The method steps involve first transforming a host plant cell with a DNA construct (such as an expression vector or a plasmid); the DNA construct comprises a polynucleotide that encodes a transcription factor polypeptide, and the polynucleotide is homologous to any of the polynucleotides of the invention. These include the transcription factor polynucleotides found in the Sequence Listing, and related sequences, such as:

[0021] (a) a nucleotide sequence encoding SEQ ID NO: 2N, where N=1 to 201 or 413 to 419, or a complementary nucleotide sequence;

[0022] (b) a nucleotide sequence comprising SEQ ID NO: 2N=1, where N=1 to 201 or 413 to 419, or SEQ ID NO: 403-824, or a complementary nucleotide sequence;

[0023] (c) a nucleotide sequence that hybridizes under stringent conditions to nucleotide sequence of either (a) or (b),

[0024] (d) a nucleotide sequence that comprises a subsequence or fragment of any of the nucleotide sequences of (a), (b) or (c), the subsequence or fragment encoding a polypeptide that imparts the desired characteristic to the fruit of the higher plant; or

[0025] (e) a nucleotide sequence encoding a polypeptide having a conserved domain with at least 80% sequence identity to a conserved domain of SEQ ID NO: 2N, where N=1 to 201 or 413 to 419.

[0026] Once the host plant cell is transformed with the DNA construct, a plant may be regenerated from the transformed host plant cell. This plant may then be grown to produce a plant having the desired yield or quality characteristic. Examples of yield characteristics that may be improved by these method steps include increased fungal disease tolerance, increased fruit weight, increased fruit number, and increased plant size. Examples of quality characteristics that may be improved by these method steps include increased fungal disease tolerance, increased lycopene levels, reduced fruit softening, and increased soluble solids.

### BRIEF DESCRIPTION OF THE SEQUENCE LISTING AND FIGURES

[0027] The Sequence Listing provides exemplary polynucleotide and polypeptide sequences of the invention. The traits associated with the use of the sequences are included in the Examples.

[0028] CD-ROMs Copy 1, Copy 2 and Copy 3 are read-only memory computer-readable compact discs and contain a copy of the Sequence Listing in ASCII text format filed under PCT Section 801(a). The Sequence Listing is named “MBI0060PCT.ST25.txt” and is 1,253 kilobytes in size. The copies of the Sequence Listing on the CD-ROM discs are hereby incorporated by reference in their entirety.

[0029] FIG. 1 shows a conservative estimate of phylogenetic relationships among the orders of flowering plants (modified from Angiosperm Phylogeny Group (1998)). Those plants with a single cotyledon (monocots) are a monophyletic clade nested within at least two major lineages of dicots; the eudicots are further divided into rosids and asterids. Arabidopsis is a rosid eudicot classified within the order Brassicales; rice is a member of the monocot order Poales. FIG. 1 was adapted from Daly et al. (2001).

[0030] FIG. 2 shows a phylogenic dendogram depicting phylogenetic relationships of higher plant taxa, including clades containing tomato and Arabidopsis; adapted from Ku et al. (2000) and Chase et al. (1993).

[0031] FIG. 3 is a schematic diagram of activator and target vectors used for transformation of tomato to achieve regulated expression of 1700 Arabidopsis transcription factors in tomato. The activator vector contained a promoter and a LexA/GAL4 or a-LacI/GAL4 transactivator (the transactivator comprises a LexA or LacI DNA binding domain fused to the GAL4 activation domain, and encodes a LexA or LacI transcriptional activator product), a GUS marker, and a neomycin phosphotransferase II (nptII) selectable marker. The target vector contains a transactivator binding site operably linked to a transgene encoding a polypeptide of interest (for example, a transcription factor of the invention), and a sulfonamide selectable marker (in this case, sulII; which encodes the dihydropteroate synthase enzyme for sulfonamide-resistance) useful in the selection for and identification of transformed plants. Binding of the transcriptional activator product encoded by the activator vector to the transactivator binding sites of the target vector initiates transcription of the transgenes of interest.

### DESCRIPTION OF THE INVENTION

[0032] In an important aspect, the present invention relates to combinations of gene promoters and polynucleotides for modifying phenotypes of plants, including those associated with improved plant or fruit yield, or improved fruit quality. Throughout this disclosure, various information sources are referred to and/or are specifically incorporated. The information sources include scientific journal articles, patent documents, textbooks, and World Wide Web browser-active and inactive page addresses, for example. While the reference to these information sources clearly indicates that they can be used by one of skill in the art, each and every one of the information sources cited herein are specifically incorporated in their entirety, whether or not a specific mention of “incorporation by reference” is noted. The contents and teachings of each and every one of the information sources can be relied on and used to make and use embodiments of the invention.

[0033] As used herein and in the appended claims, the singular forms “a,” “an,” and “the” include plural reference unless the context clearly dictates otherwise. Thus, for example, a reference to “a plant” includes a plurality of such plants.

### DEFINITIONS

[0034] “Nucleic acid molecule” refers to an oligonucleotide, polynucleotide or any fragment thereof. It may be DNA or RNA of genomic or synthetic origin, double-stranded or single-stranded, and combined with carbohydrate, lipids, protein, or other materials to perform a particular activity such as transformation or form a useful composition such as a peptide nucleic acid (PNA).

[0035] “Polynucleotide” is a nucleic acid molecule comprising a plurality of polymerized nucleotides, e.g., at least about 15 consecutive polymerized nucleotides, optionally at least about 30 consecutive nucleotides, at least about 50 consecutive nucleotides. A polynucleotide may be a nucleic acid, oligonucleotide, nucleotide, or any fragment thereof. In many instances, a polynucleotide comprises a nucleotide sequence encoding a polypeptide (or protein) or a domain or fragment thereof. Additionally, the polynucleotide may comprise a promoter, an intron, an enhancer region, a polyadenylation site, a translation initiation site, 5′ or 3′ untranslated regions, a reporter gene, a selectable marker, or the like. The polynucleotide can be single stranded or double stranded DNA or RNA. The polynucleotide optionally comprises modified bases or a modified backbone. The polynucleotide can be, e.g., genomic DNA or RNA, a transcript (such as an mRNA), a cDNA, a polymerase chain reaction (PCR) product, a cloned DNA, a synthetic DNA or RNA, or the like. The polynucleotide can be combined with carbohydrate, lipids, protein, or other materials to perform a particular activity such as transformation or form a useful composition such as a peptide nucleic acid (PNA). The polynucleotide can comprise a sequence in either sense or antisense orientations. “Oligonucleotide” is substantially equivalent to the terms amplimer, primer, oligomer, element, target, and probe and is preferably single stranded.

[0036] “Gene” or “gene sequence” refers to the partial or complete coding sequence of a gene, its complement, and its 5′ or 3′ untranslated regions. A gene is also a functional unit of inheritance, and in physical terms is a particular segment or sequence of nucleotides along a molecule of DNA (or RNA, in the case of RNA viruses) involved in producing a polypeptide chain. The latter may be subjected to subsequent processing such as splicing and folding to obtain a functional protein or polypeptide. A gene may be isolated, partially isolated, or be found with an organism's genome. By way of example, a transcription factor gene encodes a transcription factor polypeptide, which may be functional or require processing to function as an initiator of transcription.

[0037] Operationally, genes may be defined by the cis-trans test, a genetic test that determines whether two mutations occur in the same gene and which may be used to determine the limits of the genetically active unit (Rieger et al. (1976)). A gene generally includes regions preceding (“leaders”; upstream) and following (“trailers”; downstream) of the coding region. A gene may also include intervening, non-coding sequences, referred to as “introns”, located between individual coding segments, referred to as “exons”. Most genes have an associated promoter region, a regulatory sequence 5′ of the transcription initiation codon (there are some genes that do not have an identifiable promoter). The function of a gene may also be regulated by enhancers, operators, and other regulatory elements.

[0038] A “recombinant polynucleotide” is a polynucleotide that is not in its native state, e.g., the polynucleotide comprises a nucleotide sequence not found in nature, or the polynucleotide is in a context other than that in which it is naturally found, e.g., separated from nucleotide sequences with which it typically is in proximity in nature, or adjacent (or contiguous with) nucleotide sequences with which it typically is not in proximity. For example, the sequence at issue can be cloned into a vector, or otherwise recombined with one or more additional nucleic acid.

[0039] An “isolated polynucleotide” is a polynucleotide whether naturally occurring or recombinant, that is present outside the cell in which it is typically found in nature, whether purified or not. Optionally, an isolated polynucleotide is subject to one or more enrichment or purification procedures, e.g., cell lysis, extraction, centrifugation, precipitation, or the like.

[0040] A “polypeptide” is an amino acid sequence comprising a plurality of consecutive polymerized amino acid residues e.g., at least about 15 consecutive polymerized amino acid residues, optionally at least about 30 consecutive polymerized amino acid residues, at least about 50 consecutive polymerized amino acid residues. In many instances, a polypeptide comprises a polymerized amino acid residue sequence that is a transcription factor or a domain or portion or fragment thereof. Additionally, the polypeptide may comprise 1) a localization domain, 2) an activation domain, 3) a repression domain, 4) an oligomerization domain, or 5) a DNA-binding domain, or the like. The polypeptide optionally comprises modified amino acid residues, naturally occurring amino acid residues not encoded by a codon, non-naturally occurring amino acid residues.

[0041] “Protein” refers to an amino acid sequence, oligopeptide, peptide, polypeptide or portions thereof whether naturally occurring or synthetic.

[0042] “Portion”, as used herein, refers to any part of a protein used for any purpose, but especially for the screening of a library of molecules which specifically bind to that portion or for the production of antibodies.

[0043] A “recombinant polypeptide” is a polypeptide produced by translation of a recombinant polynucleotide. A “synthetic polypeptide” is a polypeptide created by consecutive polymerization of isolated amino acid residues using methods well known in the art. An “isolated polypeptide,” whether a naturally occurring or a recombinant polypeptide, is more enriched in (or out of) a cell than the polypeptide in its natural state in a wild-type cell, e.g., more than about 5% enriched, more than about 10% enriched, or more than about 20%, or more than about 50%, or more, enriched, i.e., alternatively denoted: 105%, 110%, 120%, 150% or more, enriched relative to wild type standardized at 100%. Such an enrichment is not the result of a natural response of a wild-type plant. Alternatively, or additionally, the isolated polypeptide is separated from other cellular components with which it is typically associated, e.g., by any of the various protein purification methods herein.

[0044] “Homology” refers to sequence similarity between a reference sequence and at least a fragment of a newly sequenced clone insert or its encoded amino acid sequence. Additionally, the terms “homology” and “homologous sequence(s)” may refer to one or more polypeptide sequences that are modified by chemical or enzymatic means. The homologous sequence may be a sequence modified by lipids, sugars, peptides, organic or inorganic compounds, by the use of modified amino acids or the like. Protein modification techniques are illustrated in Ausubel et al. (1998).

[0045] “Identity” or “similarity” refers to sequence similarity between two polynucleotide sequences or between two polypeptide sequences, with identity being a more strict comparison. The phrases “percent identity” and “% identity” refer to the percentage of sequence similarity found in a comparison of two or more polynucleotide sequences or two or more polypeptide sequences. “Sequence similarity” refers to the percent similarity in base pair sequence (as determined by any suitable method) between two or more polynucleotide sequences. Two or more sequences can be anywhere from 0-100% similar, or any integer value therebetween. Identity or similarity can be determined by comparing a position in each sequence that may be aligned for purposes of comparison. When a position in the compared sequence is occupied by the same nucleotide base or amino acid, then the molecules are identical at that position. A degree of similarity or identity between polynucleotide sequences is a function of the number of identical or matching nucleotides at positions shared by the polynucleotide sequences. A degree of identity of polypeptide sequences is a function of the number of identical amino acids at positions shared by the polypeptide sequences. A degree of homology or similarity of polypeptide sequences is a function of the number of amino acids at positions shared by the polypeptide sequences.

[0046] With regard to polypeptides, the terms “substantial identity” or “substantially identical” may refer to sequences of sufficient similarity and structure to the transcription factors in the Sequence Listing to produce similar function when expressed, overexpressed, or knocked-out in a plant; in the present invention, this function is improved yield and/or fruit quality. Polypeptide sequences that are at least about 55% identical to the instant polypeptide sequences are considered to have “substantial identity” with the latter. Sequences having lesser degrees of identity but comparable biological activity are considered to be equivalents. The structure required to maintain proper functionality is related to the tertiary structure of the polypeptide. There are discreet domains and motifs within a transcription factor that must be present within the polypeptide to confer function and specificity. These specific structures are required so that interactive sequences will be properly oriented to retain the desired activity. “Substantial identity” may thus also be used with regard to subsequences, for example, motifs that are of sufficient structure and similarity, being at least about 55% identical to similar motifs in other related sequences. Thus, related polypeptides within the G1950 clade have the physical characteristics of substantial identity along their full length and within their AKR-related domains. These polypeptides also share functional characteristics, as the polypeptides within this clade bind to a transcription-regulating region of DNA and improve yield and/or fruit quality in a plant when the polypeptides are overexpressed.

[0047] “Alignment” refers to a number of nucleotide or amino acid residue sequences aligned by lengthwise comparison so that components in common (i.e., nucleotide bases or amino acid residues) may be visually and readily identified. The fraction or percentage of components in common is related to the homology or identity between the sequences. Alignments may be used to identify conserved domains and relatedness within these domains. An alignment may suitably be determined by means of computer programs known in the art, such as MacVector (1999) (Accelrys, Inc., San Diego, Calif.).

[0048] A “conserved domain” or “conserved region” as used herein refers to a region in heterologous polynucleotide or polypeptide sequences where there is substantial identity between the distinct sequences. bZIPT2-related domains are examples of conserved domains.

[0049] With respect to polynucleotides encoding presently disclosed transcription factors, a conserved domain is encoded by a sequence preferably at least 10 base pairs (bp) in length.

[0050] A “conserved domain”, with respect to presently disclosed polypeptides refers to a domain within a transcription factor family that exhibits a higher degree of sequence homology or substantial identity, such as at least about 55% identity, including conservative substitutions, and preferably at least 65% sequence identity, or at least about 70% sequence identity, or at least about 75% sequence identity, or at least about 77% sequence identity, and more preferably at least about 80% sequence identity, or at least 85%, or at least about 86%, or at least about 87%, or at least about 88%, or at least about 90%, or at least about 95%, or at least about 98% amino acid residue sequence identity to a sequence of consecutive amino acid residues.

[0051] A fragment or domain can be referred to as outside a conserved domain, outside a consensus sequence, or outside a consensus DNA-binding site that is known to exist or that exists for a particular transcription factor class, family, or sub-family. In this case, the fragment or domain will not include the exact amino acids of a consensus sequence or consensus DNA-binding site of a transcription factor class, family or sub-family, or the exact amino acids of a particular transcription factor consensus sequence or consensus DNA-binding site. Furthermore, a particular fragment, region, or domain of a polypeptide, or a polynucleotide encoding a polypeptide, can be “outside a conserved domain” if all the amino acids of the fragment, region, or domain fall outside of a defined conserved domain(s) for a polypeptide or protein. Sequences having lesser degrees of identity but comparable biological activity are considered to be equivalents.

[0052] As one of ordinary skill in the art recognizes, conserved domains may be identified as regions or domains of identity to a specific consensus sequence. Thus, by using alignment methods well known in the art, the conserved domains of the plant transcription factors of the invention (e.g., bZIPT2, MYB-related, CCAAT-box binding, AP2, and AT-hook family transcription factors) may be determined. An alignment of any of the polypeptides of the invention with another polypeptide allows one of skill in the art to identify conserved domains for any of the polypeptides listed or referred to in this disclosure.

[0053] “Complementary” refers to the natural hydrogen bonding by base pairing between purines and pyrimidines. For example, the sequence A-CG-T (5′->3) forms hydrogen bonds with its complements AC-G-T (5′->3) or A-C-G-U (5′->3′). Two single-stranded molecules may be considered partially complementary, if only some of the nucleotides bond, or “completely complementary” if all of the nucleotides bond. The degree of complementarity between nucleic acid strands affects the efficiency and strength of the hybridization and amplification reactions. “Fully complementary” refers to the case where bonding occurs between every base pair and its complement in a pair of sequences, and the two sequences have the same number of nucleotides.

[0054] The terms “highly stringent” or “highly stringent condition” refer to conditions that permit hybridization of DNA strands whose sequences are highly complementary, wherein these same conditions exclude hybridization of significantly mismatched DNAs. Polynucleotide sequences capable of hybridizing under stringent conditions with the polynucleotides of the present invention may be, for example, variants of the disclosed polynucleotide sequences, including allelic or splice variants, or sequences that encode orthologs or paralogs of presently disclosed polypeptides. Nucleic acid hybridization methods are disclosed in detail by Kashima et al. (1985), Sambrook et al. (1989), and by Hames and Higgins (1985), which references are incorporated herein by reference.

[0055] In general, stringency is determined by the temperature, ionic strength, and concentration of denaturing agents (e.g., formamide) used in a hybridization and washing procedure (for a more detailed description of establishing and determining stringency, see below). The degree to which two nucleic acids hybridize under various conditions of stringency is correlated with the extent of their similarity. Thus, similar nucleic acid sequences from a variety of sources, such as within a plant's genome (as in the case of paralogs) or from another plant (as in the case of orthologs) that may perform similar functions can be isolated on the basis of their ability to hybridize with known transcription factor sequences. Numerous variations are possible in the conditions and means by which nucleic acid hybridization can be performed to isolate transcription factor sequences having similarity to transcription factor sequences known in the art and are not limited to those explicitly disclosed herein. Such an approach may be used to isolate polynucleotide sequences having various degrees of similarity with disclosed transcription factor sequences, such as, for example, transcription factors having 60% identity, or more preferably greater than about 70% identity, most preferably 72% or greater identity with disclosed transcription factors.

[0056] The terms “paralog” and “ortholog” are defined below in the section entitled “Orthologs and Paralogs”. In brief, orthologs and paralogs are evolutionarily related genes that have similar sequences and functions. Orthologs are structurally related genes in different species that are derived by a speciation event. Paralogs are structurally related genes within a single species that are derived by a duplication event.

[0057] The term “equivalog” describes members of a set of homologous proteins that are conserved with respect to function since their last common ancestor. Related proteins are grouped into equivalog families, and otherwise into protein families with other hierarchically defined homology types. This definition is provided at the Institute for Genomic Research (TIGR) World Wide Web (www) website, “tigr.org” under the heading “Terms associated with TIGRFAMs”.

[0058] The term “variant”, as used herein, may refer to polynucleotides or polypeptides that differ from the presently disclosed polynucleotides or polypeptides, respectively, in sequence from each other, and as set forth below.

[0059] With regard to polynucleotide variants, differences between presently disclosed polynucleotides and polynucleotide variants are limited so that the nucleotide sequences of the former and the latter are closely similar overall and, in many regions, identical. Due to the degeneracy of the genetic code, differences between the former and latter nucleotide sequences may be silent (i.e., the amino acids encoded by the polynucleotide are the same, and the variant polynucleotide sequence encodes the same amino acid sequence as the presently disclosed polynucleotide. Variant nucleotide sequences may encode different amino acid sequences, in which case such nucleotide differences will result in amino acid substitutions, additions, deletions, insertions, truncations or fusions with respect to the similar disclosed polynucleotide sequences. These variations result in polynucleotide variants encoding polypeptides that share at least one functional characteristic. The degeneracy of the genetic code also dictates that many different variant polynucleotides can encode identical and/or substantially similar polypeptides in addition to those sequences illustrated in the Sequence Listing.

[0060] Also within the scope of the invention is a variant of a transcription factor nucleic acid listed in the Sequence Listing, that is, one having a sequence that differs from the one of the polynucleotide sequences in the Sequence Listing, or a complementary sequence, that encodes a functionally equivalent polypeptide (i.e., a polypeptide having some degree of equivalent or similar biological activity) but differs in sequence from the sequence in the Sequence Listing, due to degeneracy in the genetic code. Included within this definition are polymorphisms that may or may not be readily detectable using a particular oligonucleotide probe of the polynucleotide encoding polypeptide, and improper or unexpected hybridization to allelic variants, with a locus other than the normal chromosomal locus for the polynucleotide sequence encoding polypeptide.

[0061] “Allelic variant” or “polynucleotide allelic variant” refers to any of two or more alternative forms of a gene occupying the same chromosomal locus. Allelic variation arises naturally through mutation, and may result in phenotypic polymorphism within populations. Gene mutations may be “silent” or may encode polypeptides having altered amino acid sequence. “Allelic variant” and “polypeptide allelic variant” may also be used with respect to polypeptides, and in this case the terms refer to a polypeptide encoded by an allelic variant of a gene.

[0062] “Splice variant” or “polynucleotide splice variant” as used herein refers to alternative forms of RNA transcribed from a gene. Splice variation naturally occurs as a result of alternative sites being spliced within a single transcribed RNA molecule or between separately transcribed RNA molecules, and may result in several different forms of mRNA transcribed from the same gene. This, splice variants may encode polypeptides having different amino acid sequences, which may or may not have similar functions in the organism. “Splice variant” or “polypeptide splice variant” may also refer to a polypeptide encoded by a splice variant of a transcribed mRNA.

[0063] As used herein, “polynucleotide variants” may also refer to polynucleotide sequences that encode paralogs and orthologs of the presently disclosed polypeptide sequences. “Polypeptide variants” may refer to polypeptide sequences that are paralogs and orthologs of the presently disclosed polypeptide sequences.

[0064] Differences between presently disclosed polypeptides and polypeptide variants are limited so that the sequences of the former and the latter are closely similar overall and, in many regions, identical. Presently disclosed polypeptide sequences and similar polypeptide variants may differ in amino acid sequence by one or more substitutions, additions, deletions, fusions and truncations, which may be present in any combination. These differences may produce silent changes and result in a functionally equivalent transcription factor. Thus, it will be readily appreciated by those of skill in the art, that any of a variety of polynucleotide sequences is capable of encoding the transcription factors and transcription factor homolog polypeptides of the invention. A polypeptide sequence variant may have “conservative” changes, wherein a substituted amino acid has similar structural or chemical properties. Deliberate amino acid substitutions may thus be made on the basis of similarity in polarity, charge, solubility, hydrophobicity, hydrophilicity, and/or the amphipathic nature of the residues, as long as the functional or biological activity of the transcription factor is retained. For example, negatively charged amino acids may include aspartic acid and glutamic acid, positively charged amino acids may include lysine and arginine, and amino acids with uncharged polar head groups having similar hydrophilicity values may include leucine, isoleucine, and valine; glycine and alanine; asparagine and glutamine; serine and threonine; and phenylalanine and tyrosine (for more detail on conservative substitutions, see Table 3). More rarely, a variant may have “non-conservative” changes, for example, replacement of a glycine with a tryptophan. Similar minor variations may also include amino acid deletions or insertions, or both. Related polypeptides may comprise, for example, additions and/or deletions of one or more N-linked or O-linked glycosylation sites, or an addition and/or a deletion of one or more cysteine residues. Guidance in determining which and how many amino acid residues may be substituted, inserted or deleted without abolishing functional or biological activity may be found using computer programs well known in the art, for example, DNASTAR software (see U.S. Pat. No. 5,840,544).

[0065] “Fragment”, with respect to a polynucleotide, refers to a clone or any part of a polynucleotide molecule that retains a usable, functional characteristic. Useful fragments include oligonucleotides and polynucleotides that may be used in hybridization or amplification technologies or in the regulation of replication, transcription or translation. A polynucleotide fragment” refers to any subsequence of a polynucleotide, typically, of at least about 9 consecutive nucleotides, preferably at least about 30 nucleotides, more preferably at least about 50 nucleotides, of any of the sequences provided herein. Exemplary polynucleotide fragments are the first sixty consecutive nucleotides of the transcription factor polynucleotides listed in the Sequence Listing. Exemplary fragments also include fragments that comprise a region that encodes an conserved domain of a transcription factor. Exemplary fragments also include fragments that comprise a conserved domain of a transcription factor. Exemplary fragments include fragments that comprise a conserved domain of a transcription factor, for example, amino acids 135-195 of G1543, SEQ ID NO: 84, as noted in Table 1.

[0066] Fragments may also include subsequences of polypeptides and protein molecules, or a subsequence of the polypeptide. Fragments may have uses in that they may have antigenic potential. In some cases, the fragment or domain is a subsequence of the polypeptide which performs at least one biological function of the intact polypeptide in substantially the same manner, or to a similar extent, as does the intact polypeptide. For example, a polypeptide fragment can comprise a recognizable structural motif or functional domain such as a DNA-binding site or domain that binds to a DNA promoter region, an activation domain, or a domain for protein-protein interactions, and may initiate transcription. Fragments can vary in size from as few as three amino acid residues to the full length of the intact polypeptide, but are preferably at least about 30 amino acid residues in length and more preferably at least about 60 amino acid residues in length.

[0067] The invention also encompasses production of DNA sequences that encode transcription factors and transcription factor derivatives, or fragments thereof, entirely by synthetic chemistry. After production, the synthetic sequence may be inserted into any of the many available expression vectors and cell systems using reagents well known in the art. Moreover, synthetic chemistry may be used to introduce mutations into a sequence encoding transcription factors or any fragment thereof.

[0068] “Derivative” refers to the chemical modification of a nucleic acid molecule or amino acid sequence. Chemical modifications can include replacement of hydrogen by an alkyl, acyl, or amino group or glycosylation, pegylation, or any similar process that retains or enhances biological activity or lifespan of the molecule or sequence.

[0069] The term “plant” includes whole plants, shoot vegetative organs/structures (for example, leaves, stems and tubers), roots, flowers and floral organs/structures (for example, bracts, sepals, petals, stamens, carpels, anthers and ovules), seed (including embryo, endosperm, and seed coat) and fruit (the mature ovary), plant tissue (for example, vascular tissue, ground tissue, and the like) and cells for example, guard cells, egg cells, and the like), and progeny of same. The class of plants that can be used in the method of the invention is generally as broad as the class of higher and lower plants amenable to transformation techniques, including angiosperms (monocotyledonous and dicotyledonous plants), gymnosperms, ferns, horsetails, psilophytes, lycophytes, bryophytes, and multicellular algae (see for example, FIG. 1, adapted from Daly et al. (2001) Plant Physiol. 127: 1328-1333; FIG. 2, adapted from Ku et al. (2000) Proc. Natl. Acad. Sci. USA 97: 9121-9126; and see also Tudge in The Variety of Life, Oxford University Press, New York N.Y. (2000) pp. 547-606).

[0070] A “transgenic plant” refers to a plant that contains genetic material not found in a wild-type plant of the same species, variety or cultivar. The genetic material may include a transgene, an insertional mutagenesis event (such as by transposon or T-DNA insertional mutagenesis), an activation tagging sequence, a mutated sequence, a homologous recombination event or a sequence modified by chimeraplasty. Typically, the foreign genetic material has been introduced into the plant by human manipulation, but any method can be used as one of skill in the art recognizes.

[0071] A transgenic plant may contain an expression vector or cassette. The expression cassette typically comprises a polypeptide-encoding sequence operably linked (i.e., under regulatory control of) to appropriate inducible or constitutive regulatory sequences that allow for the controlled expression of polypeptide. The expression cassette can be introduced into a plant by transformation or by breeding after transformation of a parent plant. A plant refers to a whole plant as well as to a plant part, such as seed, fruit, leaf, or root, plant tissue, plant cells or any other plant material, e.g., a plant explant, as well as to progeny thereof, and to in vitro systems that mimic biochemical or cellular components or processes in a cell.

[0072] “Wild type” or “wild-type”, as used herein, refers to a plant cell, seed, plant component, plant tissue, plant organ or whole plant that has not been genetically modified or treated in an experimental sense. Wild-type cells, seed, components, tissue, organs or whole plants may be used as controls to compare levels of expression and the extent and nature of trait modification with cells, tissue or plants of the same species in which a transcription factor expression is altered, e.g., in that it has been knocked out, overexpressed, or ectopically expressed.

[0073] A “control plant” as used in the present invention refers to a plant cell, seed, plant component, plant tissue, plant organ or whole plant used to compare against transgenic or genetically modified plant for the purpose of identifying an enhanced phenotype in the transgenic or genetically modified plant. A control plant may in some cases be a transgenic plant line that comprises an empty vector or marker gene, but does not contain the recombinant polynucleotide of the present invention that is expressed in the transgenic or genetically modified plant being evaluated. In general, a control plant is a plant of the same line or variety as the transgenic or genetically modified plant being tested. A suitable control plant would include a genetically unaltered or non-transgenic plant of the parental line used to generate a transgenic plant herein.

[0074] A “trait” refers to a physiological, morphological, biochemical, or physical characteristic of a plant or particular plant material or cell. In some instances, this characteristic is visible to the human eye, such as seed or plant size, or can be measured by biochemical techniques, such as detecting the protein, starch, or oil content of seed or leaves, or by observation of a metabolic or physiological process, e.g. by measuring tolerance to water deprivation or particular salt or sugar concentrations, or by the observation of the expression level of a gene or genes, e.g., by employing Northern analysis, RT-PCR, microarray gene expression assays, or reporter gene expression systems, or by agricultural observations such as osmotic stress tolerance or yield. Any technique can be used to measure the amount of, comparative level of, or difference in any selected chemical compound or macromolecule in the transgenic plants, however.

[0075] “Trait modification” refers to a detectable difference in a characteristic in a plant ectopically expressing a polynucleotide or polypeptide of the present invention relative to a plant not doing so, such as a wild-type plant. In some cases, the trait modification can be evaluated quantitatively. For example, the trait modification can entail at least about a 2% increase or decrease, or an even greater difference, in an observed trait as compared with a control or wild-type plant. It is known that there can be a natural variation in the modified trait. Therefore, the trait modification observed entails a change of the normal distribution and magnitude of the trait in the plants as compared to control or wild-type plants.

[0076] When two or more plants have “similar morphologies”, “substantially similar morphologies”, “a morphology that is substantially similar”, or are “morphologically similar”, the plants have comparable forms or appearances, including analogous features such as overall dimensions, height, width, mass, root mass, shape, glossiness, color, stem diameter, leaf size, leaf dimension, leaf density, internode distance, branching, root branching, number and form of inflorescences, and other macroscopic characteristics, and the individual plants are not readily distinguishable based on morphological characteristics alone.

[0077] “Modulates” refers to a change in activity (biological, chemical, or immunological) or lifespan resulting from specific binding between a molecule and either a nucleic acid molecule or a protein.

[0078] The term “transcript profile” refers to the expression levels of a set of genes in a cell in a particular state, particularly by comparison with the expression levels of that same set of genes in a cell of the same type in a reference state. For example, the transcript profile of a particular transcription factor in a suspension cell is the expression levels of a set of genes in a cell knocking out or overexpressing that transcription factor compared with the expression levels of that same set of genes in a suspension cell that has normal levels of that transcription factor. The transcript profile can be presented as a list of those genes whose expression level is significantly different between the two treatments, and the difference ratios. Differences and similarities between expression levels may also be evaluated and calculated using statistical and clustering methods.

[0079] “Ectopic expression or altered expression” in reference to a polynucleotide indicates that the pattern of expression in, e.g., a transgenic plant or plant tissue, is different from the expression pattern in a wild-type or control plant of the same species. The pattern of expression may also be compared with a reference expression pattern in a wild-type plant of the same species. For example, the polynucleotide or polypeptide is expressed in a cell or tissue type other than a cell or tissue type in which the sequence is expressed in the wild-type plant, or by expression at a time other than at the time the sequence is expressed in the wild-type plant, or by a response to different inducible agents, such as hormones or environmental signals, or at different expression levels (either higher or lower) compared with those found in a wild-type plant. The term also refers to altered expression patterns that are produced by lowering the levels of expression to below the detection level or completely abolishing expression. The resulting expression pattern can be transient or stable, constitutive or inducible. In reference to a polypeptide, the term “ectopic expression or altered expression” further may relate to altered activity levels resulting from the interactions of the polypeptides with exogenous or endogenous modulators or from interactions with factors or as a result of the chemical modification of the polypeptides.

[0080] The term “overexpression” as used herein refers to a greater expression level of a gene in a plant, plant cell or plant tissue, compared to expression in a wild-type plant, cell or tissue, at any developmental or temporal stage for the gene. Overexpression can occur when, for example, the genes encoding one or more transcription factors are under the control of a strong promoter (e.g., the cauliflower mosaic virus 35S transcription initiation region). Overexpression may also under the control of an inducible or tissue specific promoter. Thus, overexpression may occur throughout a plant, in specific tissues of the plant, or in the presence or absence of particular environmental signals, depending on the promoter used.

[0081] Overexpression may take place in plant cells normally lacking expression of polypeptides functionally equivalent or identical to the present transcription factors. Overexpression may also occur in plant cells where endogenous expression of the present transcription factors or functionally equivalent molecules normally occurs, but such normal expression is at a lower level. Overexpression thus results in a greater than normal production, or “overproduction” of the transcription factor in the plant, cell or tissue.

[0082] The term “transcription regulating region” refers to a DNA regulatory sequence that regulates expression of one or more genes in a plant when a transcription factor having one or more specific binding domains binds to the DNA regulatory sequence. Transcription factors of the present invention possess an AT-hook domain and a second conserved domain. Examples of similar AT-hook and second conserved domain of the sequences of the invention may be found in Table 1. The transcription factors of the invention also comprise an amino acid subsequence that forms a transcription activation domain that regulates expression of one or more abiotic stress tolerance genes in a plant when the transcription factor binds to the regulating region.

### DETAILED DESCRIPTION

### Transcription Factors Modify Expression of Endogenous Genes

[0083] A transcription factor may include, but is not limited to, any polypeptide that can activate or repress transcription of a single gene or a number of genes. As one of ordinary skill in the art recognizes, transcription factors can be identified by the presence of a region or domain of structural similarity or identity to a specific consensus sequence or the presence of a specific consensus DNA-binding site or DNA-binding site motif (see, for example, Riechmann et al. (2000). The plant transcription factors may belong to, for example, the bZIPT2-related or other transcription factor families.

[0084] Generally, the transcription factors encoded by the present sequences are involved in cell differentiation and proliferation and the regulation of growth. Accordingly, one skilled in the art would recognize that by expressing the present sequences in a plant, one may change the expression of autologous genes or induce the expression of introduced genes. By affecting the expression of similar autologous sequences in a plant that have the biological activity of the present sequences, or by introducing the present sequences into a plant, one may alter a plant's phenotype to one with improved traits related to improved yield and/or fruit quality. The sequences of the invention may also be used to transform a plant and introduce desirable traits not found in the wild-type cultivar or strain. Plants may then be selected for those that produce the most desirable degree of over- or under-expression of target genes of interest and coincident trait improvement.

[0085] The sequences of the present invention may be from any species, particularly plant species, in a naturally occurring form or from any source whether natural, synthetic, semi-synthetic or recombinant. The sequences of the invention may also include fragments of the present amino acid sequences. Where “amino acid sequence” is recited to refer to an amino acid sequence of a naturally occurring protein molecule, “amino acid sequence” and like terms are not meant to limit the amino acid sequence to the complete native amino acid sequence associated with the recited protein molecule.

[0086] In addition to methods for modifying a plant phenotype by employing one or more polynucleotides and polypeptides of the invention described herein, the polynucleotides and polypeptides of the invention have a variety of additional uses. These uses include their use in the recombinant production (i.e., expression) of proteins; as regulators of plant gene expression, as diagnostic probes for the presence of complementary or partially complementary nucleic acids (including for detection of natural coding nucleic acids); as substrates for further reactions, for example, mutation reactions, PCR reactions, or the like; as substrates for cloning for example, including digestion or ligation reactions; and for identifying exogenous or endogenous modulators of the transcription factors. In many instances, a polynucleotide comprises a nucleotide sequence encoding a polypeptide (or protein) or a domain or fragment thereof. Additionally, the polynucleotide may comprise a promoter, an intron, an enhancer region, a polyadenylation site, a translation initiation site, 5′ or 3′ untranslated regions, a reporter gene, a selectable marker, or the like. The polynucleotide can be single stranded or double stranded DNA or RNA. The polynucleotide optionally comprises modified bases or a modified backbone. The polynucleotide can be, for example, genomic DNA or RNA, a transcript (such as an mRNA), a cDNA, a PCR product, a cloned DNA, a synthetic DNA or RNA, or the like. The polynucleotide can comprise a sequence in either sense or antisense orientations.

[0087] Expression of genes that encode transcription factors that modify expression of endogenous genes, polynucleotides, and proteins are well known in the art. In addition, transgenic plants comprising isolated polynucleotides encoding transcription factors may also modify expression of endogenous genes, polynucleotides, and proteins. Examples include Peng et al. (1997) and Peng et al. (1999). In addition, many others have demonstrated that an Arabidopsis transcription factor expressed in an exogenous plant species elicits the same or very similar phenotypic response (see, for example, Fu et al. (2001); Nandi et al. (2000); Coupland (1995); and Weigel and Nilsson (1995)).

[0088] In another example, Mandel et al. (1992b) and Suzuki et al. (2001) teach that a transcription factor expressed in another plant species elicits the same or very similar phenotypic response of the endogenous sequence, as often predicted in earlier studies of Arabidopsis transcription factors in Arabidopsis (see Mandel et al. (1992b); Suzuki et al. (2001)).

[0089] Other examples include Müller et al. (2001); Kim et al. (2001); Kyozuka and Shimamoto (2002); Boss and Thomas (2002); He et al. (2000); and Robson et al. (2001).

[0090] In yet another example, Gilmour et al. (1998) teach an Arabidopsis AP2 transcription factor, CBF1, which, when overexpressed in transgenic plants, increases plant freezing tolerance. Jaglo et al. (2001) further identified sequences in Brassica napus that encode CBF-like genes and that transcripts for these genes accumulated rapidly in response to low temperature. Transcripts encoding CBF-like proteins were also found to accumulate rapidly in response to low temperature in wheat, as well as in tomato. An alignment of the CBF proteins from Arabidopsis, B. napus, wheat, rye, and tomato revealed the presence of conserved consecutive amino acid residues, PKK/RPAGRxKFxETRHP and DSAWR, which bracket the AP2/EREBP DNA binding domains of the proteins and distinguish them from other members of the AP2/EREBP protein family (Jaglo et al. (2001).

[0091] Transcription factors mediate cellular responses and control traits through altered expression of genes containing cis-acting nucleotide sequences that are targets of the introduced transcription factor. It is well appreciated in the art that the effect of a transcription factor on cellular responses or a cellular trait is determined by the particular genes whose expression is either directly or indirectly (for example, by a cascade of transcription factor binding events and transcriptional changes) altered by transcription factor binding. In a global analysis of transcription comparing a standard condition with one in which a transcription factor is overexpressed, the resulting transcript profile associated with transcription factor overexpression is related to the trait or cellular process controlled by that transcription factor. For example, the PAP2 gene and other genes in the MYB family have been shown to control anthocyanin biosynthesis through regulation of the expression of genes known to be involved in the anthocyanin biosynthetic pathway (Bruce et al. (2000); Borevitz et al. (2000)). Further, global transcript profiles have been used successfully as diagnostic tools for specific cellular states (for example, cancerous vs. non-cancerous; Bhattacharjee et al. (2001); Xu et al. (2001)). Consequently, it is evident to one skilled in the art that similarity of transcript profile upon overexpression of different transcription factors would indicate similarity of transcription factor function.

### Polypeptides and Polynucleotides of the Invention

[0092] The present invention provides, among other things, transcription factors, and transcription factor homolog polypeptides, and isolated or recombinant polynucleotides encoding the polypeptides, or novel sequence variant polypeptides or polynucleotides encoding novel variants of transcription factors derived from the specific sequences provided here.

[0093] The polynucleotides of the invention can be or were ectopically expressed in overexpressor plant cells and the changes in the expression levels of a number of genes, polynucleotides, and/or proteins of the plant cells observed. Therefore, the polynucleotides and polypeptides can be employed to change expression levels of a genes, polynucleotides, and/or proteins of plants. These polypeptides and polynucleotides may be employed to modify a plant's characteristics, particularly improvement of yield and/or fruit quality. The polynucleotides of the invention can be or were ectopically expressed in overexpressor or knockout plants and the changes in the characteristic(s) or trait(s) of the plants observed. Therefore, the polynucleotides and polypeptides can be employed to improve the characteristics of plants. The polypeptide sequences of the sequence listing, including Arabidopsis sequences G3, G22, G24, G47, G156, G159, G187, G190, G226, G237, G270, G328, G363, G383, G435, G450, G522, G551, G558, G567, G580, G635, G675, G729, G812, G843, G881, G937, G989, G1007, G1053, G1078, G1226, G1273, G1324, G1328, G1444, G1462, G1463, G1481, G1504, G1543, G1635, G1638, G1640, G1645, G1650, G1659, G1752, G1755, G1784, G1785, G1791, G1808, G1809, G1815, G1865, G1884, G1895, G1897, G1903, G1909, G1935, G1950, G1954, G1958, G2052, G2072, G2108, G2116, G2132, G2137, G2141, G2145, G2150, G2157, G2294, G2296, G2313, G2417, G2425, G2505, conferred improved characteristics when these polypeptides were overexpressed in tomato plants. These polynucleotides have been shown to have a strong association with improved biomass, which is related to yield, and greater lycopene or soluble solids, which impacts fruit quality. Paralogs of these sequences that may be expected to function in a similar manner include G10, G12, G28, G30, G65, G195, G198, G225, G248, G448, G455, G456, G506, G554, G555, G556, G568, G577, G578, G629, G682, G730, G761, G798, G900, G986, G1006, G1040, G1047, G1198, G1264, G1277, G1309, G1354, G1355, G1379, G1453, G1461, G1464, G1465, G1754, G1766, G1792, G1795, G1806, G1816, G1846, G1917, G2058, G2067, G2115, G2133, G2148, G2424, G2436, G2442, G2443, G2467, G2504, G2512, G2534, G2578, G2629, G2635, G2718, G2893, G3034. Orthologs of these sequences that are expected to function in a similar manner include G3380, G3381, G3383, G3392, G3393, G3430, G3431, G3444, G3445, G3446, G3447, G3448, G3449, G3450, G3490, G3515, G3516, G3517, G3518, G3519, G3520, G3524, G3643, G3644, G3645, G3646, G3647, G3649, G3651, G3656, G3659, G3660, G3661, G3717, G3718, G3735, G3736, G3737, G3739, G3794, G3841, G3843, G3844, G3845, G3846, G3848, G3852, G3856, G3857, G3858, G3864, G3865.

[0094] The invention also encompasses sequences that are complementary to the polynucleotides of the invention. The polynucleotides are also useful for screening libraries of molecules or compounds for specific binding and for creating transgenic plants having improved yield and/or fruit quality. Altering the expression levels of equivalogs of these sequences, including paralogs and orthologs in the Sequence Listing, and other orthologs that are structurally and sequentially similar to the former orthologs, has been shown and is expected to confer similar phenotypes, including improved biomass, yield and/or fruit quality in plants.

[0095] In some cases, exemplary polynucleotides encoding the polypeptides of the invention were identified in the Arabidopsis thaliana GenBank database using publicly available sequence analysis programs and parameters. Sequences initially identified were then further characterized to identify sequences comprising specified sequence strings corresponding to sequence motifs present in families of known transcription factors. In addition, further exemplary polynucleotides encoding the polypeptides of the invention were identified in the plant GenBank database using publicly available sequence analysis programs and parameters. Sequences initially identified were then further characterized to identify sequences comprising specified sequence strings corresponding to sequence motifs present in families of known transcription factors. Polynucleotide sequences meeting such criteria were confirmed as transcription factors.

[0096] Additional polynucleotides of the invention were identified by screening Arabidopsis thaliana and/or other plant cDNA libraries with probes corresponding to known transcription factors under low stringency hybridization conditions. Additional sequences, including full length coding sequences were subsequently recovered by the rapid amplification of cDNA ends (RACE) procedure, using a commercially available kit according to the manufacturer's instructions. Where necessary, multiple rounds of RACE are performed to isolate 5′ and 3′ ends. The full-length cDNA was then recovered by a routine end-to-end PCR using primers specific to the isolated 5′ and 3′ ends. Exemplary sequences are provided in the Sequence Listing.

[0097] The invention also entails an agronomic composition comprising a polynucleotide of the invention in conjunction with a suitable carrier and a method for altering a plant's trait using the composition.

[0098] Examples of specific polynucleotide and polypeptides of the invention, and equivalog sequences, along with descriptions of the gene families that comprise these polynucleotides and polypeptides, are provided below.

[0099] Table 1 shows a number of polypeptides of the invention shown to improve fruit or yield characteristics (SEQ ID NO: 2N, where N=1 to 82), paralogs of these sequences (SEQ ID NO: 2N, where N=83 to 148 or 416) and orthologs (SEQ ID NO: 2N, where N=150 to 201, 413 to 415, or 417 to 419), identified by SEQ ID NO; Identifier (e.g., Gene ID (GID) No); the transcription factor family to which the polypeptide belongs, and conserved domain amino acid coordinates of the polypeptide.

TABLE 1
Gene families and conserved domains

| Polypeptide | | Conserved Domains in | |
|---|---|---|---|
| SEQ ID NO: | GID | Amino Acid Coordinates | Family |
| 2 | G3 | 28-95 | AP2 |
| 4 | G22 | 88-152 | AP2 |
| 6 | G24 | 25-92 | AP2 |
| 8 | G47 | 10-75 | AP2 |
| 10 | G156 | 2-57 | MADS |
| 12 | G159 | 7-61 | MADS |
| 14 | G187 | 172-228 | WRKY |
| 16 | G190 | 110-169 | WRKY |
| 18 | G226 | 38-82 | MYB-related |
| 20 | G237 | 11-113 | MYB-(R1)R2R3 |
| 22 | G270 | 259-424 | AKR |
| 24 | G328 | 12-78 | Z-CO-like |
| 26 | G363 | 87-108 | Z-C2H2 |
| 28 | G383 | 77-102 | GATA/Zn |
| 30 | G435 | 4-67 | HB |
| 32 | G450 | 6-14, 78-89, 112-128, 180-217 | IAA |
| 34 | G522 | 10-165 | NAC |
| 36 | G551 | 73-133 | HB |
| 38 | G558 | 45-105 | bZIP |
| 40 | G567 | 210-270 | bZIP |
| 42 | G580 | 162-218 | bZIP |
| 44 | G635 | 239-323 | TH |
| 46 | G675 | 13-116 | MYB-(R1)R2R3 |
| 48 | G729 | 224-272 | GARP |
| 50 | G812 | 29-120 | HS |
| 52 | G843 | 60-119, 270-350 | MISC |
| 54 | G881 | 176-233 | WRKY |
| 56 | G937 | 197-246 | GARP |
| 58 | G989 | 121-186, 238-326, 327-399 | SCR |
| 60 | G1007 | 23-90 | AP2 |
| 62 | G1053 | 74-120 | bZIP |
| 64 | G1078 | 1-53, 440-550 | BZIPT2 |
| 66 | G1226 | 115-174 | HLH/MYC |
| 68 | G1273 | 163-218, 347-403 | WRKY |
| 70 | G1324 | 20-118 | MYB-(R1)R2R3 |
| 72 | G1328 | 14-119 | MYB-(R1)R2R3 |
| 74 | G1444 | 17-101 | GRF-like |
| 76 | G1462 | 14-273 | NAC |
| 78 | G1463 | 9-156 | NAC |
| 80 | G1481 | 5-27, 47-73 | Z-CO-like |
| 82 | G1504 | 193-206 | GATA/Zn |
| 84 | G1543 | 135-195 | HB |
| 86 | G1635 | 56-102 | MYB-related |
| 88 | G1638 | 27-77, 141-189 | MYB-related |
| 90 | G1640 | 14-115 | MYB-(R1)R2R3 |
| 92 | G1645 | 90-210 | MYB-(R1)R2R3 |
| 94 | G1650 | 284-334 | HLH/MYC |
| 96 | G1659 | 17-116 | DBP |
| 98 | G1752 | 83-151 | AP2 |
| 100 | G1755 | 71-133 | AP2 |
| 102 | G1784 | 60-248 | PMR |
| 104 | G1785 | 25-125 | MYB-(R1)R2R3 |
| 106 | G1791 | 10-74 | AP2 |
| 108 | G1808 | 140-200 | bZIP |
| 110 | G1809 | 136-196 | bZIP |
| 112 | G1815 | 65-170 | MYB-(R1)R2R3 |
| 114 | G1865 | 45-162 | GRF-like |
| 116 | G1884 | 43-71 | Z-Dof |
| 118 | G1895 | 58-100 | Z-Dof |
| 120 | G1897 | 34-62 | Z-Dof |
| 122 | G1903 | 134-180 | Z-Dof |
| 124 | G1909 | 23-51 | Z-Dof |
| 126 | G1935 | 1-57 | MADS |
| 128 | G1950 | 65-228 | AKR |
| 130 | G1954 | 187-259 | HLH/MYC |
| 132 | G1958 | 230-278 | GARP |
| 134 | G2052 | 7-158 | NAC |
| 136 | G2072 | 90-149 | bZIP |
| 138 | G2108 | 18-85 | AP2 |
| 140 | G2116 | 150-210 | bZIP |
| 142 | G2132 | 84-151 | AP2 |
| 144 | G2137 | 109-168 | WRKY |
| 146 | G2141 | 302-380 | HLH/MYC |
| 148 | G2145 | 166-243 | HLH/MYC |
| 150 | G2150 | 190-268 | HLH/MYC |
| 152 | G2157 | 82-102, 107-164 | AT-hook |
| 154 | G2294 | 32-100 | AP2 |
| 156 | G2296 | 85-145 | WRKY |
| 158 | G2313 | 111-159 | MYB-related |
| 160 | G2417 | 235-285 | GARP |
| 162 | G2425 | 12-119 | MYB-(R1)R2R3 |
| 164 | G2505 | 9-137 | NAC |
| 166 | G10 | 21-88 | AP2 |
| 168 | G12 | 27-94 | AP2 |
| 170 | G28 | 145-208 | AP2 |
| 172 | G30 | 16-80 | AP2 |
| 174 | G165 | 7-62 | MADS |
| 176 | G195 | 183-239 | WRKY |
| 178 | G198 | 14-117 | MYB-(R1)R2R3 |
| 180 | G225 | 36-80 | MYB-related |
| 182 | G248 | 264-332 | MYB-(R1)R2R3 |
| 184 | G448 | 11-20, 83-95, 111-128, 180-214 | IAA |
| 186 | G455 | 11-19, 84-95, 126-142, 194-227 | IAA |
| 188 | G456 | 7-14, 71-81, 120-153, 185-221 | IAA |
| 190 | G506 | 8-157 | NAC |
| 192 | G554 | 82-142 | bZIP |
| 194 | G555 | 38-110 | bZIP |
| 196 | G556 | 83-143 | bZIP |
| 198 | G568 | 215-265 | bZIP |
| 200 | G577 | 1-53, 356-466 | BZIPT2 |
| 202 | G578 | 36-96 | bZIP |
| 204 | G629 | 92-152 | bZIP |
| 206 | G682 | 33-77 | MYB-related |
| 208 | G730 | 169-217 | GARP |
| 210 | G761 | 10-156 | NAC |
| 212 | G798 | 19-47 | Z-Dof |
| 214 | G900 | 6-28, 48-74 | Z-CO-like |
| 216 | G986 | 146-203 | WRKY |
| 218 | G1006 | 113-177 | AP2 |
| 220 | G1040 | 109-158 | GARP |
| 222 | G1047 | 129-180 | bZIP |
| 224 | G1198 | 173-223 | bZIP |
| 226 | G1264 | 96-138 | Z-Dof |
| 228 | G1277 | 18-85 | AP2 |
| 230 | G1309 | 9-114 | MYB-(R1)R2R3 |
| 232 | G1354 | 7-157 | NAC |
| 234 | G1355 | 9-159 | NAC |
| 236 | G1379 | 18-85 | AP2 |
| 238 | G1453 | 13-160 | NAC |
| 240 | G1461 | 37-163 | NAC |
| 242 | G1464 | 12-160 | NAC |
| 244 | G1465 | 242-306 | NAC |
| 246 | G1754 | 69-136 | AP2 |
| 248 | G1766 | 10-153 | NAC |
| 250 | G1792 | 16-80 | AP2 |
| 252 | G1795 | 11-75 | AP2 |
| 254 | G1806 | 165-225 | bZIP |
| 256 | G1816 | 30-74 | MYB-related |
| 258 | G1846 | 16-83 | AP2 |
| 260 | G1917 | 153-179 | GATA/Zn |
| 262 | G2058 | 2-57 | MADS |
| 264 | G2067 | 40-102 | AP2 |
| 266 | G2115 | 47-113 | AP2 |
| 268 | G2133 | 10-77 | AP2 |
| 270 | G2148 | 130-268 | HLH/MYC |
| 272 | G2424 | 107-219 | MYB-(R1)R2R3 |
| 274 | G2436 | 16-111 | Z-CO-like |
| 276 | G2442 | 220-246 | GATA/Zn |
| 278 | G2443 | 20-86 | Z-CO-like |
| 280 | G2467 | 28-119 | HS |
| 282 | G2504 | 222-248 | GATA/Zn |
| 284 | G2512 | 79-147 | AP2 |
| 286 | G2534 | 10-157 | NAC |
| 288 | G2578 | 1-57 | MADS |
| 290 | G2629 | 85-154 | bZIP |
| 292 | G2635 | 8-161 | NAC |
| 294 | G2718 | 32-76 | MYB-related |
| 296 | G2893 | 19-120 | MYB-(R1)R2R3 |
| 298 | G3034 | 218-266 | GARP |
| 300 | G3380 | 18-82 | AP2 |
| 302 | G3381 | 14-78 | AP2 |
| 304 | G3383 | 9-73 | AP2 |
| 306 | G3392 | 32-76 | MYB-related |
| 308 | G3393 | 31-75 | MYB-related |
| 310 | G3430 | 109-173 | AP2 |
| 312 | G3431 | 31-75 | MYB-related |
| 314 | G3444 | 31-75 | MYB-related |
| 316 | G3445 | 25-69 | MYB-related |
| 318 | G3446 | 26-70 | MYB-related |
| 320 | G3447 | 26-70 | MYB-related |
| 322 | G3448 | 26-70 | MYB-related |
| 324 | G3449 | 26-70 | MYB-related |
| 326 | G3450 | 20-64 | MYB-related |
| 328 | G3490 | 60-120 | HB |
| 826 | G3510 | 74-134 | HB |
| 330 | G3515 | 11-75 | AP2 |
| 332 | G3516 | 6-70 | AP2 |
| 334 | G3517 | 13-77 | AP2 |
| 336 | G3518 | 13-77 | AP2 |
| 338 | G3519 | 13-77 | AP2 |
| 340 | G3520 | 14-78 | AP2 |
| 342 | G3524 | 60-120 | HB |
| 344 | G3643 | 13-78 | AP2 |
| 346 | G3644 | 52-122 | AP2 |
| 348 | G3645 | 10-75 | AP2 |
| 350 | G3646 | 10-77 | AP2 |
| 352 | G3647 | 13-78 | AP2 |
| 354 | G3649 | 15-87 | AP2 |
| 828 | G3650 | 75-139 | AP2 |
| 356 | G3651 | 60-130 | AP2 |
| 358 | G3656 | 23-86 | AP2 |
| 830 | G3657 | 47-109 | AP2 |
| 360 | G3659 | 130-194 | AP2 |
| 362 | G3660 | 119-183 | AP2 |
| 364 | G3661 | 126-190 | AP2 |
| 366 | G3717 | 130-194 | AP2 |
| 368 | G3718 | 139-203 | AP2 |
| 370 | G3735 | 23-87 | AP2 |
| 372 | G3736 | 12-76 | AP2 |
| 374 | G3737 | 8-72 | AP2 |
| 376 | G3739 | 13-77 | AP2 |
| 378 | G3794 | 6-70 | AP2 |
| 380 | G3841 | 102-166 | AP2 |
| 382 | G3843 | 130-194 | AP2 |
| 384 | G3844 | 141-205 | AP2 |
| 386 | G3845 | 101-165 | AP2 |
| 388 | G3846 | 95-159 | AP2 |
| 390 | G3848 | 149-213 | AP2 |
| 392 | G3852 | 102-167 | AP2 |
| 394 | G3856 | 140-204 | AP2 |
| 396 | G3857 | 98-162 | AP2 |
| 398 | G3858 | 108-172 | AP2 |
| 400 | G3864 | 127-191 | AP2 |
| 402 | G3865 | 125-189 | AP2 |
| 832 | G3930 | 33-77 | MYB-related |
| 834 | G4014 | 4-75 | Z-CO-like |
| 836 | G4015 | 8-79 | Z-CO-like |
| 838 | G4016 | 4-75 | Z-CO-like |

### Producing Polypeptides

[0100] The polynucleotides of the invention include sequences that encode transcription factors and transcription factor homolog polypeptides and sequences complementary thereto, as well as unique fragments of coding sequence, or sequence complementary thereto. Such polynucleotides can be, for example, DNA or RNA, the latter including mRNA, cRNA, synthetic RNA, genomic DNA, cDNA synthetic DNA, oligonucleotides, etc. The polynucleotides are either double-stranded or single-stranded, and include either, or both sense (i.e., coding) sequences and antisense (i.e., non-coding, complementary) sequences. The polynucleotides include the coding sequence of a transcription factor, or transcription factor homolog polypeptide, in isolation, in combination with additional coding sequences (e.g., a purification tag, a localization signal, as a fusion-protein, as a pre-protein, or the like), in combination with non-coding sequences (for example, introns or inteins, regulatory elements such as promoters, enhancers, terminators, and the like), and/or in a vector or host environment in which the polynucleotide encoding a transcription factor or transcription factor homolog polypeptide is an endogenous or exogenous gene.

[0101] A variety of methods exist for producing the polynucleotides of the invention. Procedures for identifying and isolating DNA clones are well known to those of skill in the art, and are described in, for example, Berger and Kimmel (1987); Sambrook et al. (1989) and Ausubel et al. (supplemented through 2000).

[0102] Alternatively, polynucleotides of the invention, can be produced by a variety of in vitro amplification methods adapted to the present invention by appropriate selection of specific or degenerate primers. Examples of protocols sufficient to direct persons of skill through in vitro amplification methods, including the polymerase chain reaction (PCR) the ligase chain reaction (LCR), Qβ-replicase amplification and other RNA polymerase mediated techniques (for example, NASBA), e.g., for the production of the homologous nucleic acids of the invention are found in Berger and Kimmel (1987), Sambrook (1989), and Ausubel (2000), as well as Mullis et al. (1990). Improved methods for cloning in vitro amplified nucleic acids are described in U.S. Pat. No. 5,426,039. Improved methods for amplifying large nucleic acids by PCR are summarized in Cheng et al. (1994) and the references cited therein, in which PCR amplicons of up to 40 kb are generated. One of skill will appreciate that essentially any RNA can be converted into a double stranded DNA suitable for restriction digestion, PCR expansion and sequencing using reverse transcriptase and a polymerase. See, e.g., Ausubel (2000), Sambrook (1989) and Berger and Kimmel (1987).

[0103] Alternatively, polynucleotides and oligonucleotides of the invention can be assembled from fragments produced by solid-phase synthesis methods. Typically, fragments of up to approximately 100 bases are individually synthesized and then enzymatically or chemically ligated to produce a desired sequence, e.g., a polynucleotide encoding all or part of a transcription factor. For example, chemical synthesis using the phosphoramidite method is described, e.g., by Beaucage et al. (1981) and Matthes et al. (1984). According to such methods, oligonucleotides are synthesized, purified, annealed to their complementary strand, ligated and then optionally cloned into suitable vectors. And if so desired, the polynucleotides and polypeptides of the invention can be custom ordered from any of a number of commercial suppliers.

### Homologous Sequences

[0104] Sequences homologous, i.e., that share significant sequence identity or similarity, to those provided in the Sequence Listing, derived from Arabidopsis thaliana or from other plants of choice, are also an aspect of the invention. Homologous sequences can be derived from any plant including monocots and dicots and in particular agriculturally important plant species, including but not limited to, crops such as soybean, wheat, corn (maize), potato, cotton, rice, rape, oilseed rape (including canola), sunflower, alfalfa, clover, sugarcane, and turf; or fruits and vegetables, such as banana, blackberry, blueberry, strawberry, and raspberry, cantaloupe, carrot, cauliflower, coffee, cucumber, eggplant, grapes, honeydew, lettuce, mango, melon, onion, papaya, peas, peppers, pineapple, pumpkin, spinach, squash, sweet corn, tobacco, tomato, tomatillo, watermelon, rosaceous fruits (such as apple, peach, pear, cherry and plum) and vegetable brassicas (such as broccoli, cabbage, cauliflower, Brussels sprouts, and kohlrabi). Other crops, including fruits and vegetables, whose phenotype can be changed and which comprise homologous sequences include barley; rye; millet; sorghum; currant; avocado; citrus fruits such as oranges, lemons, grapefruit and tangerines, artichoke, cherries; nuts such as the walnut and peanut; endive; leek; roots such as arrowroot, beet, cassava, turnip, radish, yam, and sweet potato; and beans. The homologous sequences may also be derived from woody species, such pine, poplar and eucalyptus, or mint or other labiates. In addition, homologous sequences may be derived from plants that are evolutionarily related to crop plants, but which may not have yet been used as crop plants. Examples include deadly nightshade (Atropa belladona), related to tomato; jimson weed (Datura strommium), related to peyote; and teosinte (Zea species), related to corn (maize).

### Orthologs and Paralogs

[0105] Homologous sequences as described above can comprise orthologous or paralogous sequences. Several different methods are known by those of skill in the art for identifying and defining these functionally homologous sequences. Three general methods for defining orthologs and paralogs are described; an ortholog, paralog or homolog may be identified by one or more of the methods described below.

[0106] Orthologs and paralogs are evolutionarily related genes that have similar sequence and functions. Orthologs are structurally related genes in different species that are derived by a speciation event. Paralogs are structurally related genes within a single species that are derived by a duplication event. Sequences that are sufficiently similar to one another will be appreciated by those of skill in the art and may be based upon percentage identity of the complete sequences, percentage identity of a conserved domain or sequence within the complete sequence, percentage similarity to the complete sequence, percentage similarity to a conserved domain or sequence within the complete sequence, and/or an arrangement of contiguous nucleotides or peptides particular to a conserved domain or complete sequence. Sequences that are sufficiently similar to one another will also bind in a similar manner to the same DNA binding sites of transcriptional regulatory elements using methods well known to those of skill in the art.

[0107] Paralogs typically cluster together or in the same clade (a group of similar genes) when a gene family phylogeny is analyzed using programs such as CLUSTAL (Thompson et al. (1994); Higgins et al. (1996)). Groups of similar genes can also be identified with pair-wise BLAST analysis (Feng and Doolittle (1987)). For example, a clade of very similar MADS domain transcription factors from Arabidopsis all share a common function in flowering time (Ratcliffe et al. (2001), and a group of very similar AP2 domain transcription factors from Arabidopsis are involved in tolerance of plants to freezing (Gilmour et al. (1998)). Analysis of groups of similar genes with similar function that fall within one clade can yield sub-sequences that are particular to the clade. These sub-sequences, known as consensus sequences, can not only be used to define the sequences within each clade, but define the functions of these genes; genes within a clade may contain paralogous sequences, or orthologous sequences that share the same function (see also, for example, Mount (2001)). Paralogous genes may retain similar functions of the encoded proteins. In such cases, paralogs can be used interchangeably with respect to certain embodiments of the instant invention (for example, transgenic expression of a coding sequence). An example of such highly related paralogs is the CBF family, with four well-defined members in Arabidopsis (CBF1, CBF2, CBF3 and GenBank accession number AB015478) and at least one ortholog in Brassica napus, bnCBF1, all of which control pathways involved in both freezing and drought stress (Gilmour et al. (1998); Jaglo et al. (1998)).

[0108] Speciation, the production of new species from a parental species, can also give rise to two or more genes with similar sequence. Because plants have common ancestors, many genes in any plant species will have a corresponding orthologous gene in another plant species. Once a phylogenic tree for a gene family of one species has been constructed using a program such as CLUSTAL (Thompson et al. (1994); Higgins et al. (1996) potential orthologous sequences can be placed into the phylogenetic tree and their relationship to genes from the species of interest can be determined. Orthologous sequences can also be identified by a reciprocal BLAST strategy. Once an orthologous sequence has been identified, the function of the ortholog can be deduced from the identified function of the reference sequence. Orthologous genes from different organisms have highly conserved functions, and very often essentially identical functions (Lee et al. (2002); Remm et al. (2001)).

[0109] Transcription factor gene sequences are conserved across diverse eukaryotic species lines (Goodrich et al. (1993); Lin et al. (1991); Sadowski et al. (1988)). Plants are no exception to this observation; diverse plant species possess transcription factors that have similar sequences and functions.

[0110] The following references represent a small sampling of the many studies that demonstrate that conserved transcription factor genes from diverse species are likely to function similarly (i.e., regulate similar target sequences and control the same traits), and that transcription factors may be transformed into diverse species to confer or improve traits.

[0111] (1) The Arabidopsis NPR1 gene regulates systemic acquired resistance (SAR; Cao et al. (1997)); over-expression of NPR1 leads to enhanced resistance in Arabidopsis. When either Arabidopsis NPR1 or the rice NPR1 ortholog was overexpressed in rice (which, as a monocot, is diverse from Arabidopsis), challenge with the rice bacterial blight pathogen Xanthomonas oryzae pv. Oryzae, the transgenic plants displayed enhanced resistance (Chern et al. (2001)). NPR1 acts through activation of expression of transcription factor genes, such as TGA2 (Fan and Dong (2002)).

[0112] (2) E2F genes are involved in transcription of plant genes for proliferating cell nuclear antigen (PCNA). Plant E2Fs share a high degree of similarity in amino acid sequence between monocots and dicots, and are even similar to the conserved domains of the animal E2Fs. Such conservation indicates a functional similarity between plant and animal E2Fs. E2F transcription factors that regulate meristem development act through common cis-elements, and regulate related (PCNA) genes (Kosugi and Ohashi (2002)).

[0113] (3) The ABI5 gene (ABA insensitive 5) encodes a basic leucine zipper factor required for ABA response in the seed and vegetative tissues. Co-transformation experiments with ABI5 cDNA constructs in rice protoplasts resulted in specific transactivation of the ABA-inducible wheat, Arabidopsis, bean, and barley promoters. These results demonstrate that sequentially similar ABI5 transcription factors are key targets of a conserved ABA signaling pathway in diverse plants. (Gampala et al. (2001)).

[0114] (4) Sequences of three Arabidopsis GAMYB-like genes were obtained on the basis of sequence similarity to GAMYB genes from barley, rice, and L. temulentum. These three Arabidopsis genes were determined to encode transcription factors (AtMYB33, AtMYB65, and AtMYB101) and could substitute for a barley GAMYB and control alpha-amylase expression (Gocal et al. (2001)).

[0115] (5) The floral control gene LEAFY from Arabidopsis can dramatically accelerate flowering in numerous dicotyledonous plants. Constitutive expression of Arabidopsis LEAFY also caused early flowering in transgenic rice (a monocot), with a heading date that was 26-34 days earlier than that of wild-type plants. These observations indicate that floral regulatory genes from Arabidopsis are useful tools for heading date improvement in cereal crops (He et al. (2000)).

[0116] (6) Bioactive gibberellins (GAs) are essential endogenous regulators of plant growth. GA signaling tends to be conserved across the plant kingdom. GA signaling is mediated via GAI, a nuclear member of the GRAS family of plant transcription factors. Arabidopsis GAI has been shown to function in rice to inhibit gibberellin response pathways (Fu et al. (2001)).

[0117] (7) The Arabidopsis gene SUPERMAN (SUP), encodes a putative transcription factor that maintains the boundary between stamens and carpels. By over-expressing Arabidopsis SUP in rice, the effect of the gene's presence on whorl boundaries was shown to be conserved. This demonstrated that SUP is a conserved regulator of floral whorl boundaries and affects cell proliferation (Nandi et al. (2000)).

[0118] (8) Maize, petunia and Arabidopsis myb transcription factors that regulate flavonoid biosynthesis are very genetically similar and affect the same trait in their native species, therefore sequence and function of these myb transcription factors correlate with each other in these diverse species (Borevitz et al. (2000)).

[0119] (9) Wheat reduced height-1 (Rht-B1/Rht-D1) and maize dwarf-8 (d8) genes are orthologs of the Arabidopsis gibberellin insensitive (GAI) gene. Both of these genes have been used to produce dwarf grain varieties that have improved grain yield. These genes encode proteins that resemble nuclear transcription factors and contain an SH2-like domain, indicating that phosphotyrosine may participate in gibberellin signaling. Transgenic rice plants containing a mutant GAI allele from Arabidopsis have been shown to produce reduced responses to gibberellin and are dwarfed, indicating that mutant GAI orthologs could be used to increase yield in a wide range of crop species (Peng et al. (1999)).

[0120] Transcription factors that are homologous to the listed sequences will typically share at least about 70% amino acid sequence identity in the conserved domain. More closely related transcription factors can share at least about 79% or about 90% or about 95% or about 98% or more sequence identity with the listed sequences, or with the listed sequences but excluding or outside a known consensus sequence or consensus DNA-binding site, or with the listed sequences excluding one or all conserved domains. Factors that are most closely related to the listed sequences share, e.g., at least about 85%, about 90% or about 95% or more % sequence identity to the listed sequences, or to the listed sequences but excluding or outside a known consensus sequence or consensus DNA-binding site or outside one or all conserved domain. At the nucleotide level, the sequences will typically share at least about 40% nucleotide sequence identity, preferably at least about 50%, about 60%, about 70% or about 80% sequence identity, and more preferably about 85%, about 90%, about 95% or about 97% or more sequence identity to one or more of the listed sequences, or to a listed sequence but excluding or outside a known consensus sequence or consensus DNA-binding site, or outside one or all conserved domain. The degeneracy of the genetic code enables major variations in the nucleotide sequence of a polynucleotide while maintaining the amino acid sequence of the encoded protein. TH domains within the TH transcription factor family may exhibit a higher degree of sequence homology, such as at least 70% amino acid sequence identity including conservative substitutions, and preferably at least 80% sequence identity, and more preferably at least 85%, or at least about 86%, or at least about 87%, or at least about 88%, or at least about 90%, or at least about 95%, or at least about 98% sequence identity. Transcription factors that are homologous to the listed sequences should share at least 30%, or at least about 60%, or at least about 75%, or at least about 80%, or at least about 90%, or at least about 95% amino acid sequence identity over the entire length of the polypeptide or the homolog.

[0121] Percent identity can be determined electronically, e.g., by using the MEGALIGN program (DNASTAR, Inc. Madison, Wis.). The MEGALIGN program can create alignments between two or more sequences according to different methods, for example, the clustal method (see, for example, Higgins and Sharp (1988)). The clustal algorithm groups sequences into clusters by examining the distances between all pairs. The clusters are aligned pairwise and then in groups. Other alignment algorithms or programs may be used, including FASTA, BLAST, or ENTREZ, FASTA and BLAST, and which may be used to calculate percent similarity. These are available as a part of the GCG sequence analysis package (University of Wisconsin, Madison, Wis.), and can be used with or without default settings. ENTREZ is available through the National Center for Biotechnology Information. In one embodiment, the percent identity of two sequences can be determined by the GCG program with a gap weight of 1, e.g., each amino acid gap is weighted as if it were a single amino acid or nucleotide mismatch between the two sequences (see U.S. Pat. No. 6,262,333).

[0122] Other techniques for alignment are described in Doolittle, ed. (1996). Preferably, an alignment program that permits gaps in the sequence is utilized to align the sequences. The Smith-Waterman is one type of algorithm that permits gaps in sequence alignments (see Shpaer (1997)). Also, the GAP program using the Needleman and Wunsch alignment method can be utilized to align sequences. An alternative search strategy uses MPSRCH software, which runs on a MASPAR computer. MPSRCH uses a Smith-Waterman algorithm to score sequences on a massively parallel computer. This approach improves ability to pick up distantly related matches, and is especially tolerant of small gaps and nucleotide sequence errors. Nucleic acid-encoded amino acid sequences can be used to search both protein and DNA databases.

[0123] The percentage similarity between two polypeptide sequences, e.g., sequence A and sequence B, is calculated by dividing the length of sequence A, minus the number of gap residues in sequence A, minus the number of gap residues in sequence B, into the sum of the residue matches between sequence A and sequence B, times one hundred. Gaps of low or of no similarity between the two amino acid sequences are not included in determining percentage similarity. Percent identity between polynucleotide sequences can also be counted or calculated by other methods known in the art, e.g., the Jotun Hein method (see, e.g., Hein (1990)). Identity between sequences can also be determined by other methods known in the art, e.g., by varying hybridization conditions (see US Patent Application No. 20010010913).

[0124] Thus, the invention provides methods for identifying a sequence similar or paralogous or orthologous or homologous to one or more polynucleotides as noted herein, or one or more target polypeptides encoded by the polynucleotides, or otherwise noted herein and may include linking or associating a given plant phenotype or gene function with a sequence. In the methods, a sequence database is provided (locally or across an internet or intranet) and a query is made against the sequence database using the relevant sequences herein and associated plant phenotypes or gene functions.

[0125] In addition, one or more polynucleotide sequences or one or more polypeptides encoded by the polynucleotide sequences may be used to search against a BLOCKS (Bairoch et al. (1997)), PFAM, and other databases which contain previously identified and annotated motifs, sequences and gene functions. Methods that search for primary sequence patterns with secondary structure gap penalties (Smith et al. (1992) as well as algorithms such as Basic Local Alignment Search Tool (BLAST; Altschul (1993); Altschul et al. (1990)), BLOCKS (Henikoff and Henikoff (1991)), Hidden Markov Models (HMM; Eddy (1996); Sonnhammer et al. (1997)), and the like, can be used to manipulate and analyze polynucleotide and polypeptide sequences encoded by polynucleotides. These databases, algorithms and other methods are well known in the art and are described in Ausubel et al. (1997) and in Meyers (1995).

[0126] Another method for identifying or confirming that specific homologous sequences control the same function is by comparison of the transcript profile(s) obtained upon overexpression or knockout of two or more related transcription factors. Since transcript profiles are diagnostic for specific cellular states, one skilled in the art will appreciate that genes that have a highly similar transcript profile (e.g., with greater than 50% regulated transcripts in common, more preferably with greater than 70% regulated transcripts in common, most preferably with greater than 90% regulated transcripts in common) will have highly similar functions. Fowler and Thomashow (2002) have shown that three paralogous AP2 family genes (CBF1, CBF2 and CBF3), each of which is induced upon cold treatment, and each of which can condition improved freezing tolerance, have highly similar transcript profiles. Once a transcription factor has been shown to provide a specific function, its transcript profile becomes a diagnostic tool to determine whether putative paralogs or orthologs have the same function.

[0127] Furthermore, methods using manual alignment of sequences similar or homologous to one or more polynucleotide sequences or one or more polypeptides encoded by the polynucleotide sequences may be used to identify regions of similarity and TH domains. Such manual methods are well-known of those of skill in the art and can include, for example, comparisons of tertiary structure between a polypeptide sequence encoded by a polynucleotide which comprises a known function and a polypeptide sequence encoded by a polynucleotide sequence which has a function not yet determined. Such examples of tertiary structure may comprise predicted alpha helices, beta-sheets, amphipathic helices, leucine zipper motifs, zinc finger motifs, proline-rich regions, cysteine repeat motifs, and the like.

[0128] Orthologs and paralogs of presently disclosed transcription factors may be cloned using compositions provided by the present invention according to methods well known in the art. cDNAs can be cloned using mRNA from a plant cell or tissue that expresses one of the present transcription factors. Appropriate mRNA sources may be identified by interrogating Northern blots with probes designed from the present transcription factor sequences, after which a library is prepared from the mRNA obtained from a positive cell or tissue. Transcription factor-encoding cDNA is then isolated using, for example, PCR, using primers designed from a presently disclosed transcription factor gene sequence, or by probing with a partial or complete cDNA or with one or more sets of degenerate probes based on the disclosed sequences. The cDNA library may be used to transform plant cells. Expression of the cDNAs of interest is detected using, for example, methods disclosed herein such as microarrays, Northern blots, quantitative PCR, or any other technique for monitoring changes in expression. Genomic clones may be isolated using similar techniques to those.

### Identifying Polynucleotides or Nucleic Acids by Hybridization

[0129] Polynucleotides homologous to the sequences illustrated in the Sequence Listing and tables can be identified, e.g., by hybridization to each other under stringent or under highly stringent conditions. Single stranded polynucleotides hybridize when they associate based on a variety of well characterized physical-chemical forces, such as hydrogen bonding, solvent exclusion, base stacking and the like. The stringency of a hybridization reflects the degree of sequence identity of the nucleic acids involved, such that the higher the stringency, the more similar are the two polynucleotide strands. Stringency is influenced by a variety of factors, including temperature, salt concentration and composition, organic and non-organic additives, solvents, etc. present in both the hybridization and wash solutions and incubations (and number thereof), as described in more detail in the references cited below (e.g., Sambrook et al. (1989); Berger and Kimmel (1987); and Anderson and Young (1985)).

[0130] Encompassed by the invention are polynucleotide sequences that are capable of hybridizing to the claimed polynucleotide sequences, including any of the transcription factor polynucleotides within the Sequence Listing, and fragments thereof under various conditions of stringency (see, for example, Wahl and Berger (1987); and Kimmel (1987)). In addition to the nucleotide sequences in the Sequence Listing, full length cDNA, orthologs, and paralogs of the present nucleotide sequences may be identified and isolated using well-known methods. The cDNA libraries, orthologs, and paralogs of the present nucleotide sequences may be screened using hybridization methods to determine their utility as hybridization target or amplification probes.

[0131] With regard to hybridization, conditions that are highly stringent, and means for achieving them, are well known in the art. See, for example, Sambrook et al. (1989); Berger and Kimmel (1987) pp. 467-469; and Anderson and Young (1985).

[0132] Stability of DNA duplexes is affected by such factors as base composition, length, and degree of base pair mismatch Hybridization conditions may be adjusted to allow DNAs of different sequence relatedness to hybridize. The melting temperature (Tₘ) is defined as the temperature when 50% of the duplex molecules have dissociated into their constituent single strands. The melting temperature of a perfectly matched duplex, where the hybridization buffer contains formamide as a denaturing agent, may be estimated by the following equations:

Tₘ(° C.)=81.5+16.6(log [Na+])+0.41 (% G+C−0.62 (% formamide)−500/L (I) DNA-DNA

Tₘ(° C.)=79.8+18.5(log [Na+])+0.58 (% G+C)+0.12 (% G+C)²−0.5 (% formamide)−820/L (II) DNA-RNA

Tₘ(° C.)=79.8+18.5(log [Na+])+0.58 (% G+C)+0.12 (% G+C)²−0.35 (% formamide)−820/L (III) RNA-RNA

[0133] where L is the length of the duplex formed, [Na+] is the molar concentration of the sodium ion in the hybridization or washing solution, and % G+C is the percentage of (guanine+cytosine) bases in the hybrid. For imperfectly matched hybrids, approximately 1° C. is required to reduce the melting temperature for each 1% mismatch.

[0134] Hybridization experiments are generally conducted in a buffer of pH between 6.8 to 7.4, although the rate of hybridization is nearly independent of pH at ionic strengths likely to be used in the hybridization buffer (Anderson and Young (1985)). In addition, one or more of the following may be used to reduce non-specific hybridization: sonicated salmon sperm DNA or another non-complementary DNA, bovine serum albumin, sodium pyrophosphate, sodium dodecylsulfate (SDS), polyvinyl-pyrrolidone, ficoll and Denhardt's solution. Dextran sulfate and polyethylene glycol 6000 act to exclude DNA from solution, thus raising the effective probe DNA concentration and the hybridization signal within a given unit of time. In some instances, conditions of even greater stringency may be desirable or required to reduce non-specific and/or background hybridization. These conditions may be created with the use of higher temperature, lower ionic strength and higher concentration of a denaturing agent such as formamide.

[0135] Stringency conditions can be adjusted to screen for moderately similar fragments such as homologous sequences from distantly related organisms, or to highly similar fragments such as genes that duplicate functional enzymes from closely related organisms. The stringency can be adjusted either during the hybridization step or in the post-hybridization washes. Salt concentration, formamide concentration, hybridization temperature and probe lengths are variables that can be used to alter stringency (as described by the formula above). As a general guidelines high stringency is typically performed at Tₘ-5° C. to Tₘ-20° C., moderate stringency at Tₘ-20° C. to Tₘ-35° C. and low stringency at Tₘ-35° C. to Tₘ-50° C. for duplex>150 base pairs. Hybridization may be performed at low to moderate stringency (25-50° C. below Tₘ), followed by post-hybridization washes at increasing stringencies. Maximum rates of hybridization in solution are determined empirically to occur at Tₘ-25° C. for DNA-DNA duplex and Tₘ-15° C. for RNA-DNA duplex. Optionally, the degree of dissociation may be assessed after each wash step to determine the need for subsequent, higher stringency wash steps.

[0136] High stringency conditions may be used to select for nucleic acid sequences with high degrees of identity to the disclosed sequences. An example of stringent hybridization conditions obtained in a filter-based method such as a Southern or northern blot for hybridization of complementary nucleic acids that have more than 100 complementary residues is about 5° C. to 20° C. lower than the thermal melting point (Tₘ) for the specific sequence at a defined ionic strength and pH. Conditions used for hybridization may include about 0.02 M to about 0.15 M sodium chloride, about 0.5% to about 5% casein, about 0.02% SDS or about 0.1% N-laurylsarcosine, about 0.001 M to about 0.03 M sodium citrate, at hybridization temperatures between about 50° C. and about 70° C. More preferably, high stringency conditions are about 0.02 M sodium chloride, about 0.5% casein, about 0.02% SDS, about 0.001 M sodium citrate, at a temperature of about 50° C. Nucleic acid molecules that hybridize under stringent conditions will typically hybridize to a probe based on either the entire DNA molecule or selected portions, e.g., to a unique subsequence, of the DNA.

[0137] Stringent salt concentration will ordinarily be less than about 750 mM NaCl and 75 mM trisodium citrate. Increasingly stringent conditions may be obtained with less than about 500 mM NaCl and 50 mM trisodium citrate, to even greater stringency with less than about 250 mM NaCl and 25 mM trisodium citrate. Low stringency hybridization can be obtained in the absence of organic solvent, e.g., formamide, whereas high stringency hybridization may be obtained in the presence of at least about 35% formamide, and more preferably at least about 50% formamide. Stringent temperature conditions will ordinarily include temperatures of at least about 30° C., more preferably of at least about 37° C., and most preferably of at least about 42° C. with formamide present. Varying additional parameters, such as hybridization time, the concentration of detergent, e.g., sodium dodecyl sulfate (SDS) and ionic strength, are well known to those skilled in the art. Various levels of stringency are accomplished by combining these various conditions as needed.

[0138] The washing steps that follow hybridization may also vary in stringency; the post-hybridization wash steps primarily determine hybridization specificity, with the most critical factors being temperature and the ionic strength of the final wash solution. Wash stringency can be increased by decreasing salt concentration or by increasing temperature. Stringent salt concentration for the wash steps will preferably be less than about 30 mM NaCl and 3 mM trisodium citrate, and most preferably less than about 15 mM NaCl and 1.5 mM trisodium citrate.

[0139] Thus, hybridization and wash conditions that may be used to bind and remove polynucleotides with less than the desired homology to the nucleic acid sequences or their complements that encode the present transcription factors include, for example:

[0140] 6×SSC at 65° C.;

[0141] 50% formamide, 4×SSC at 42° C.; or

[0142] 0.5×SSC, 0.1% SDS at 65° C.;

[0143] with, for example, two wash steps of 10-30 minutes each. Useful variations on these conditions will be readily apparent to those skilled in the art.

[0144] A person of skill in the art would not expect substantial variation among polynucleotide species encompassed within the scope of the present invention because the highly stringent conditions set forth in the above formulae yield structurally similar polynucleotides.

[0145] If desired, one may employ wash steps of even greater stringency, including about 0.2×SSC, 0.1% SDS at 65° C. and washing twice, each wash step being about 30 min, or about 0.1×SSC, 0.1% SDS at 65° C. and washing twice for 30 min. The temperature for the wash solutions will ordinarily be at least about 25° C., and for greater stringency at least about 42° C. Hybridization stringency may be increased further by using the same conditions as in the hybridization steps, with the wash temperature raised about 3° C. to about 5° C., and stringency may be increased even further by using the same conditions except the wash temperature is raised about 6° C. to about 9° C. For identification of less closely related homologs, wash steps may be performed at a lower temperature, e.g., 50° C.

[0146] An example of a low stringency wash step employs a solution and conditions of at least 25° C. in 30 mM NaCl, 3 mM trisodium citrate, and 0.1% SDS over 30 min. Greater stringency may be obtained at 42° C. in 15 mM NaCl, with 1.5 mM trisodium citrate, and 0.1% SDS over 30 min. Even higher stringency wash conditions are obtained at 65° C.-68° C. in a solution of 15 mM NaCl, 1.5 mM trisodium citrate, and 0.1% SDS. Wash procedures will generally employ at least two final wash steps. Additional variations on these conditions will be readily apparent to those skilled in the art (see, for example, US Patent Application No. 20010010913).

[0147] Stringency conditions can be selected such that an oligonucleotide that is perfectly complementary to the coding oligonucleotide hybridizes to the coding oligonucleotide with at least about a 5-10× higher signal to noise ratio than the ratio for hybridization of the perfectly complementary oligonucleotide to a nucleic acid encoding a transcription factor known as of the filing date of the application. It may be desirable to select conditions for a particular assay such that a higher signal to noise ratio, that is, about 15× or more, is obtained. Accordingly, a subject nucleic acid will hybridize to a unique coding oligonucleotide with at least a 2× or greater signal to noise ratio as compared to hybridization of the coding oligonucleotide to a nucleic acid encoding known polypeptide. The particular signal will depend on the label used in the relevant assay, e.g., a fluorescent label, a calorimetric label, a radioactive label, or the like. Labeled hybridization or PCR probes for detecting related polynucleotide sequences may be produced by oligolabeling, nick translation, end-labeling, or PCR amplification using a labeled nucleotide.

[0148] Encompassed by the invention are polynucleotide sequences that are capable of hybridizing to the claimed polynucleotide sequences, for example, to SEQ ID NO: 2N-1, where N=1 to 201 or 413 to 419, and SEQ ID NO: 403-824, and fragments thereof under various conditions of stringency (see, e.g., Wahl and Berger (1987); Kimmel (1987)). Estimates of homology are provided by either DNA-DNA or DNA-RNA hybridization under conditions of stringency as is well understood by those skilled in the art (Hames and Higgins (1985). Stringency conditions can be adjusted to screen for moderately similar fragments, such as homologous sequences from distantly related organisms, to highly similar fragments, such as genes that duplicate functional enzymes from closely related organisms. Post-hybridization washes determine stringency conditions.

Identifying Polynucleotides or Nucleic Acids with Expression Libraries

[0149] In addition to hybridization methods, transcription factor homolog polypeptides can be obtained by screening an expression library using antibodies specific for one or more transcription factors. With the provision herein of the disclosed transcription factor, and transcription factor homolog nucleic acid sequences, the encoded polypeptide(s) can be expressed and purified in a heterologous expression system (e.g., E. coli) and used to raise antibodies (monoclonal or polyclonal) specific for the polypeptide(s) in question. Antibodies can also be raised against synthetic peptides derived from transcription factor, or transcription factor homolog, amino acid sequences. Methods of raising antibodies are well known in the art and are described in Harlow and Lane (1988). Such antibodies can then be used to screen an expression library produced from the plant from which it is desired to clone additional transcription factor homologs, using the methods described above. The selected cDNAs can be confirmed by sequencing and enzymatic activity.

### Sequence Variations

[0150] It will readily be appreciated by those of skill in the art, that any of a variety of polynucleotide sequences are capable of encoding the transcription factors and transcription factor homolog polypeptides of the invention. Due to the degeneracy of the genetic code, many different polynucleotides can encode identical and/or substantially similar polypeptides in addition to those sequences illustrated in the Sequence Listing. Nucleic acids having a sequence that differs from the sequences shown in the Sequence Listing, or complementary sequences, that encode functionally equivalent peptides (i.e., peptides having some degree of equivalent or similar biological activity) but differ in sequence from the sequence shown in the Sequence Listing due to degeneracy in the genetic code, are also within the scope of the invention.

[0151] Altered polynucleotide sequences encoding polypeptides include those sequences with deletions, insertions, or substitutions of different nucleotides, resulting in a polynucleotide encoding a polypeptide with at least one functional characteristic of the instant polypeptides. Included within this definition are polymorphisms that may or may not be readily detectable using a particular oligonucleotide probe of the polynucleotide encoding the instant polypeptides, and improper or unexpected hybridization to allelic variants, with a locus other than the normal chromosomal locus for the polynucleotide sequence encoding the instant polypeptides.

[0152] Allelic variant refers to any of two or more alternative forms of a gene occupying the same chromosomal locus. Allelic variation arises naturally through mutation, and may result in phenotypic polymorphism within populations. Gene mutations can be silent (i.e., no change in the encoded polypeptide) or may encode polypeptides having altered amino acid sequence. The term allelic variant is also used herein to denote a protein encoded by an allelic variant of a gene. Splice variant refers to alternative forms of RNA transcribed from a gene. Splice variation arises naturally through use of alternative splicing sites within a transcribed RNA molecule, or less commonly between separately transcribed RNA molecules, and may result in several mRNAs transcribed from the same gene. Splice variants may encode polypeptides having altered amino acid sequence. The term splice variant is also used herein to denote a protein encoded by a splice variant of an mRNA transcribed from a gene.

[0153] Those skilled in the art would recognize that, for example, G1950, SEQ ID NO: 128, represents a single transcription factor; allelic variation and alternative splicing may be expected to occur. Allelic variants of SEQ ID NO: 127 can be cloned by probing cDNA or genomic libraries from different individual organisms according to standard procedures. Allelic variants of the DNA sequence shown in SEQ ID NO: 127, including those containing silent mutations and those in which mutations result in amino acid sequence changes, are within the scope of the present invention, as are proteins which are allelic variants of SEQ ID NO: 128. cDNAs generated from alternatively spliced mRNAs, which retain the properties of the transcription factor are included within the scope of the present invention, as are polypeptides encoded by such cDNAs and mRNAs. Allelic variants and splice variants of these sequences can be cloned by probing cDNA or genomic libraries from different individual organisms or tissues according to standard procedures known in the art (see U.S. Pat. No. 6,388,064).

[0154] Thus, in addition to the sequences set forth in the Sequence Listing, the invention also encompasses related nucleic acid molecules that include allelic or splice variants of the sequences of the invention, for example, SEQ ID NO: 2N-1, where N=1 to 201 or 413 to 419, or SEQ ID NO: 403 to 824, and include sequences that are complementary to any of the above nucleotide sequences. Related nucleic acid molecules also include nucleotide sequences encoding a polypeptide comprising a substitution, modification, addition and/or deletion of one or more amino acid residues compared to the polypeptide sequences of the invention, for example, SEQ ID NO: 2N, where N=1 to 201 or 413 to 419, or sequences encoded by SEQ ID NO: 403 to 824. Such related polypeptides may comprise, for example, additions and/or deletions of one or more N-linked or O-linked glycosylation sites, or an addition and/or a deletion of one or more cysteine residues.

[0155] For example, Table 2 illustrates, e.g., that the codons AGC, AGT, TCA, TCC, TCG, and TCT all encode the same amino acid: serine. Accordingly, at each position in the sequence where there is a codon encoding serine, any of the above trinucleotide sequences can be used without altering the encoded polypeptide.

TABLE 2

| Amino acid | | | Possible Codons | | | | | |
|---|---|---|---|---|---|---|---|---|
| Alanine | Ala | A | GCA | GCC | GCG | GCT | | |
| Cysteine | Cys | C | TGC | TGT | | | | |
| Aspartic acid | Asp | D | GAC | GAT | | | | |
| Glutamic acid | Glu | E | GAA | GAG | | | | |
| Phenylalanine | Phe | F | TTC | TTT | | | | |
| Glycine | Gly | G | GGA | GGC | GGG | GGT | | |
| Histidine | His | H | CAC | CAT | | | | |
| Isoleucine | Ile | I | ATA | ATC | ATT | | | |
| Lysine | Lys | K | AAA | AAG | | | | |
| Leucine | Leu | L | TTA | TTG | CTA | CTC | CTG | CTT |
| Methionine | Met | M | ATG | | | | | |
| Asparagine | Asn | N | AAC | AAT | | | | |
| Proline | Pro | P | CCA | CCC | CCG | CCT | | |
| Glutamine | Gln | Q | CAA | CAG | | | | |
| Arginine | Arg | R | AGA | AGG | CGA | CGC | CGG | CGT |
| Serine | Ser | S | AGC | AGT | TCA | TCC | TGG | TCT |
| Threonine | Thr | T | ACA | ACC | ACG | ACT | | |
| Valine | Val | V | GTA | GTC | GTG | GTT | | |
| Tryptophan | Trp | W | TGG | | | | | |
| Tyrosine | Tyr | Y | TAC | TAT | | | | |

[0156] Sequence alterations that do not change the amino acid sequence encoded by the polynucleotide are termed “silent” variations. With the exception of the codons ATG and TGG, encoding methionine and tryptophan, respectively, any of the possible codons for the same amino acid can be substituted by a variety of techniques, e.g., site-directed mutagenesis, available in the art. Accordingly, any and all such variations of a sequence selected from the above table are a feature of the invention.

[0157] In addition to silent variations, other conservative variations that alter one, or a few amino acid residues in the encoded polypeptide, can be made without altering the function of the polypeptide, these conservative variants are, likewise, a feature of the invention.

[0158] For example, substitutions, deletions and insertions introduced into the sequences provided in the Sequence Listing, are also envisioned by the invention. Such sequence modifications can be engineered into a sequence by site-directed mutagenesis (Wu (1993) or the other methods noted below. Amino acid substitutions are typically of single residues; insertions usually will be on the order of about from 1 to 10 amino acid residues; and deletions will range about from 1 to 30 residues. In preferred embodiments, deletions or insertions are made in adjacent pairs, e.g., a deletion of two residues or insertion of two residues. Substitutions, deletions, insertions or any combination thereof can be combined to arrive at a sequence. The mutations that are made in the polynucleotide encoding the transcription factor should not place the sequence out of reading frame and should not create complementary regions that could produce secondary mRNA structure. Preferably, the polypeptide encoded by the DNA performs the desired function.

[0159] Conservative substitutions are those in which at least one residue in the amino acid sequence has been removed and a different residue inserted in its place. Such substitutions generally are made in accordance with the Table 3 when it is desired to maintain the activity of the protein. Table 3 shows amino acids which can be substituted for an amino acid in a protein and which are typically regarded as conservative substitutions.

TABLE 3

| | Conservative |
|---|---|
| Residue | Substitutions |
| Ala | Ser |
| Arg | Lys |
| Asn | Gln; His |
| Asp | Glu |
| Gln | Asn |
| Cys | Ser |
| Glu | Asp |
| Gly | Pro |
| His | Asn; Gln |
| Ile | Leu, Val |
| Leu | Ile; Val |
| Lys | Arg; Gln |
| Met | Leu; Ile |
| Phe | Met; Leu; Tyr |
| Ser | Thr; Gly |
| Thr | Ser; Val |
| Trp | Tyr |
| Tyr | Trp; Phe |
| Val | Ile; Leu |

[0160] Similar substitutions are those in which at least one residue in the amino acid sequence has been removed and a different residue inserted in its place. Such substitutions generally are made in accordance with the Table 4 when it is desired to maintain the activity of the protein. Table 4 shows amino acids which can be substituted for an amino acid in a protein and which are typically regarded as structural and functional substitutions. For example, a residue in column 1 of Table 4 may be substituted with a residue in column 2; in addition, a residue in column 2 of Table 4 may be substituted with the residue of column 1.

TABLE 4

| Residue | Similar Substitutions |
|---|---|
| Ala | Ser; Thr; Gly; Val; Leu; Ile |
| Arg | Lys; His; Gly |
| Asn | Gln; His; Gly; Ser; Thr |
| Asp | Glu, Ser; Thr |
| Gln | Asn; Ala |
| Cys | Ser; Gly |
| Glu | Asp |
| Gly | Pro; Arg |
| His | Asn; Gln; Tyr; Phe; Lys; Arg |
| Ile | Ala; Leu; Val; Gly; Met |
| Leu | Ala; Ile; Val; Gly; Met |
| Lys | Arg; His; Gln; Gly; Pro |
| Met | Leu; Ile; Phe |
| Phe | Met; Leu; Tyr; Trp; His; Val; Ala |
| Ser | Thr; Gly; Asp; Ala; Val; Ile; His |
| Thr | Ser; Val; Ala; Gly |
| Trp | Tyr; Phe; His |
| Tyr | Trp; Phe; His |
| Val | Ala; Ile; Leu; Gly; Thr; Ser; Glu |

[0161] Substitutions that are less conservative than those in Table 4 can be selected by picking residues that differ more significantly in their effect on maintaining (a) the structure of the polypeptide backbone in the area of the substitution, for example, as a sheet or helical conformation, (b) the charge or hydrophobicity of the molecule at the target site, or (c) the bulk of the side chain. The substitutions which in general are expected to produce the greatest changes in protein properties will be those in which (a) a hydrophilic residue, e.g., seryl or threonyl, is substituted for (or by) a hydrophobic residue, e.g., leucyl, isoleucyl, phenylalanyl, valyl or alanyl; (b) a cysteine or proline is substituted for (or by) any other residue; (c) a residue having an electropositive side chain, e.g., lysyl, arginyl, or histidyl, is substituted for (or by) an electronegative residue, e.g., glutamyl or aspartyl; or (d) a residue having a bulky side chain, e.g., phenylalanine, is substituted for (or by) one not having a side chain, e.g., glycine.

### Further Modifying Sequences of the Invention—Mutation/Forced Evolution

[0162] In addition to generating silent or conservative substitutions as noted, above, the present invention optionally includes methods of modifying the sequences of the Sequence Listing. In the methods, nucleic acid or protein modification methods are used to alter the given sequences to produce new sequences and/or to chemically or enzymatically modify given sequences to change the properties of the nucleic acids or proteins.

[0163] Thus, in one embodiment, given nucleic acid sequences are modified, e.g., according to standard mutagenesis or artificial evolution methods to produce modified sequences. The modified sequences may be created using purified natural polynucleotides isolated from any organism or may be synthesized from purified compositions and chemicals using chemical means well know to those of skill in the art. For example, Ausubel (2000), provides additional details on mutagenesis methods. Artificial forced evolution methods are described, for example, by Stemmer (1994a), Stemmer (1994b), and U.S. Pat. Nos. 5,811,238, 5,837,500, and 6,242,568. Methods for engineering synthetic transcription factors and other polypeptides are described, for example, by Zhang et al. (2000), Liu et al. (2001), and Isalan et al. (2001). Many other mutation and evolution methods are also available and expected to be within the skill of the practitioner.

[0164] Similarly, chemical or enzymatic alteration of expressed nucleic acids and polypeptides can be performed by standard methods. For example, sequence can be modified by addition of lipids, sugars, peptides, organic or inorganic compounds, by the inclusion of modified nucleotides or amino acids, or the like. For example, protein modification techniques are illustrated in Ausubel (2000). Further details on chemical and enzymatic modifications can be found herein. These modification methods can be used to modify any given sequence, or to modify any sequence produced by the various mutation and artificial evolution modification methods noted herein.

[0165] Accordingly, the invention provides for modification of any given nucleic acid by mutation, evolution, chemical or enzymatic modification, or other available methods, as well as for the products produced by practicing such methods, e.g., using the sequences herein as a starting substrate for the various modification approaches.

[0166] For example, optimized coding sequence containing codons preferred by a particular prokaryotic or eukaryotic host can be used e.g., to increase the rate of translation or to produce recombinant RNA transcripts having desirable properties, such as a longer half-life, as compared with transcripts produced using a non-optimized sequence. Translation stop codons can also be modified to reflect host preference. For example, preferred stop codons for Saccharomyces cerevisiae and mammals are TAA and TGA, respectively. The preferred stop codon for monocotyledonous plants is TGA, whereas insects and E. coli prefer to use TAA as the stop codon.

[0167] The polynucleotide sequences of the present invention can also be engineered in order to alter a coding sequence for a variety of reasons, including but not limited to, alterations which modify the sequence to facilitate cloning, processing and/or expression of the gene product. For example, alterations are optionally introduced using techniques which are well known in the art, e.g., site-directed mutagenesis, to insert new restriction sites, to alter glycosylation patterns, to change codon preference, to introduce splice sites, etc.

[0168] Furthermore, a fragment or domain derived from any of the polypeptides of the invention can be combined with domains derived from other transcription factors or synthetic domains to modify the biological activity of a transcription factor. For instance, a DNA-binding domain derived from a transcription factor of the invention can be combined with the activation domain of another transcription factor or with a synthetic activation domain. A transcription activation domain assists in initiating transcription from a DNA-binding site. Examples include the transcription activation region of VP16.0 or GAL4 (Moore et al. (1998); Aoyama et al. (1995)), peptides derived from bacterial sequences (Ma and Ptashne (1987)) and synthetic peptides (Giniger and Ptashne (1987)).

### Expression and Modification of Polypeptides

[0169] Typically, polynucleotide sequences of the invention are incorporated into recombinant DNA (or RNA) molecules that direct expression of polypeptides of the invention in appropriate host cells, transgenic plants, in vitro translation systems, or the like. Due to the inherent degeneracy of the genetic code, nucleic acid sequences which encode substantially the same or a functionally equivalent amino acid sequence can be substituted for any listed sequence to provide for cloning and expressing the relevant homolog.

[0170] The transgenic plants of the present invention comprising recombinant polynucleotide sequences are generally derived from parental plants, which may themselves be non-transformed (or non-transgenic) plants. These transgenic plants may either have a transcription factor gene “knocked out” (for example, with a genomic insertion by homologous recombination, an antisense or ribozyme construct) or expressed to a normal or wild-type extent. However, overexpressing transgenic “progeny” plants will exhibit greater mRNA levels, wherein the mRNA encodes a transcription factor, that is, a DNA-binding protein that is capable of binding to a DNA regulatory sequence and inducing transcription, and preferably, expression of a plant trait gene, such as a gene that improves plant and/or fruit quality and/or yield. Preferably, the mRNA expression level will be at least three-fold greater than that of the parental plant, or more preferably at least ten-fold greater mRNA levels compared to said parental plant, and most preferably at least fifty-fold greater compared to said parental plant.

### Vectors, Promoters, and Expression Systems

[0171] This section describes vectors, promoters, and expression systems that may be used with the present invention. Expression constructs that have been used to transform plants for testing in field trials are also described in Example III. The present invention includes recombinant constructs comprising one or more of the nucleic acid sequences herein. The constructs typically comprise a vector, such as a plasmid, a cosmid, a phage, a virus (e.g., a plant virus), a bacterial artificial chromosome (BAC), a yeast artificial chromosome (YAC), or the like, into which a nucleic acid sequence of the invention has been inserted, in a forward or reverse orientation. In a preferred aspect of this embodiment, the construct further comprises regulatory sequences, including, for example, a promoter, operably linked to the sequence. Large numbers of suitable vectors and promoters are known to those of skill in the art, and are commercially available.

[0172] General texts that describe molecular biological techniques useful herein, including the use and production of vectors, promoters and many other relevant topics, include Berger and Kimmel (1987), Sambrook (1989) and Ausubel (2000). Any of the identified sequences can be incorporated into a cassette or vector, e.g., for expression in plants. A number of expression vectors suitable for stable transformation of plant cells or for the establishment of transgenic plants have been described including those described in Weissbach and Weissbach (1989) and Gelvin et al. (1990). Specific examples include those derived from a Ti plasmid of Agrobacterium tumefaciens, as well as those disclosed by Herrera-Estrella et al. (1983), Bevan (1984), and Klee (1985) for dicotyledonous plants.

[0173] Alternatively, non-Ti vectors can be used to transfer the DNA into monocotyledonous plants and cells by using free DNA delivery techniques. Such methods can involve, for example, the use of liposomes, electroporation, microprojectile bombardment, silicon carbide whiskers, and viruses. By using these methods transgenic plants such as wheat, rice (Christou (1991) and corn (Gordon-Kamm (1990) can be produced. An immature embryo can also be a good target tissue for monocots for direct DNA delivery techniques by using the particle gun (Weeks et al. (1993); Vasil (1993a); Wan and Lemeaux (1994), and for Agrobacterium-mediated DNA transfer (Ishida et al. (1996)).

[0174] Typically, plant transformation vectors include one or more cloned plant coding sequence (genomic or cDNA) under the transcriptional control of 5′ and 3′ regulatory sequences and a dominant selectable marker. Such plant transformation vectors typically also contain a promoter (e.g., a regulatory region controlling inducible or constitutive, environmentally- or developmentally-regulated, or cell- or tissue-specific expression), a transcription initiation start site, an RNA processing signal (such as intron splice sites), a transcription termination site, and/or a polyadenylation signal.

[0175] A potential utility for the transcription factor polynucleotides disclosed herein is the isolation of promoter elements from these genes that can be used to program expression in plants of any genes. Each transcription factor gene disclosed herein is expressed in a unique fashion, as determined by promoter elements located upstream of the start of translation, and additionally within an intron of the transcription factor gene or downstream of the termination codon of the gene. As is well known in the art, for a significant portion of genes, the promoter sequences are located entirely in the region directly upstream of the start of translation. In such cases, typically the promoter sequences are located within 2.0 KB of the start of translation, or within 1.5 KB of the start of translation, frequently within 1.0 KB of the start of translation, and sometimes within 0.5 KB of the start of translation.

[0176] The promoter sequences can be isolated according to methods known to one skilled in the art.

[0177] Examples of constitutive plant promoters which can be useful for expressing the transcription factor sequence include: the cauliflower mosaic virus (CaMV) 35S promoter, which confers constitutive, high-level expression in most plant tissues (see, e.g., Odell et al. (1985)); the nopaline synthase promoter (An et al. (1988)); and the octopine synthase promoter (Fromm et al. (1989)).

[0178] The transcription factors of the invention may be operably linked with a specific promoter that causes the transcription factor to be expressed in response to environmental, tissue-specific or temporal signals. A variety of plant gene promoters that regulate gene expression in response to environmental, hormonal, chemical, developmental signals, and in a tissue-active manner can be used for expression of a transcription factor sequence in plants. Choice of a promoter is based largely on the phenotype of interest and is determined by such factors as tissue (e.g., seed, fruit, root, pollen, vascular tissue, flower, carpet, etc.), inducibility (e.g., in response to wounding, heat, cold, drought, light, pathogens, etc.), timing, developmental stage, and the like. Numerous known promoters have been characterized and can favorably be employed to promote expression of a polynucleotide of the invention in a transgenic plant or cell of interest. For example, tissue specific promoters include: seed-specific promoters (such as the napin, phaseolin or DC3 promoter described in U.S. Pat. No. 5,773,697), fruit-specific promoters that are active during fruit ripening (such as the dru 1 promoter (U.S. Pat. No. 5,783,393), or the 2A11 promoter (U.S. Pat. No. 4,943,674) and the tomato polygalacturonase promoter (Bird et al. (1988)), root-specific promoters, such as those disclosed in U.S. Pat. Nos. 5,618,988, 5,837,848 and 5,905,186, pollen-active promoters such as PTA29, PTA26 and PTA13 (U.S. Pat. No. 5,792,929), promoters active in vascular tissue (Ringli and Keller (1998)), flower-specific (Kaiser et al. (1995)), pollen (Baerson et al. (1994)), carpels (Ohl et al. (1990)), pollen and ovules (Baerson et al. (1993)), auxin-inducible promoters (such as that described in van der Kop et al. (999) or Baumann et al. (1999)), cytokinin-inducible promoter (Guevara-Garcia (1998)), promoters responsive to gibberellin (Shi et al. (1998), Willmott et al. (1998)) and the like. Additional promoters are those that elicit expression in response to heat (Ainley et al. (1993)), light (e.g., the pea rbcS-3A promoter, Kuhlemeier et al. (1989)), and the maize rbcS promoter, Schaffher and Sheen (1991)); wounding (e.g., wunI, Siebertz et al. (1989)); pathogens (such as the PR-1 promoter described in Buchel et al. (1999) and the PDF1.2 promoter described in Manners et al. (1998), and chemicals such as methyl jasmonate or salicylic acid (Gatz (1997)). In addition, the timing of the expression can be controlled by using promoters such as those acting at senescence (Gan and Amasino (1995)); or late seed development (Odell et al. (1994)).

[0179] Plant expression vectors can also include RNA processing signals that can be positioned within, upstream or downstream of the coding sequence. In addition, the expression vectors can include additional regulatory sequences from the 3′-untranslated region of plant genes, e.g., a 3′ terminator region to increase mRNA stability of the mRNA, such as the PI-II terminator region of potato or the octopine or nopaline synthase 3′ terminator regions.

### Additional Expression Elements

[0180] Specific initiation signals can aid in efficient translation of coding sequences. These signals can include, e.g., the ATG initiation codon and adjacent sequences. In cases where a coding sequence, its initiation codon and upstream sequences are inserted into the appropriate expression vector, no additional translational control signals may be needed. However, in cases where only coding sequence (e.g., a mature protein coding sequence), or a portion thereof, is inserted, exogenous transcriptional control signals including the ATG initiation codon can be separately provided. The initiation codon is provided in the correct reading frame to facilitate transcription. Exogenous transcriptional elements and initiation codons can be of various origins, both natural and synthetic. The efficiency of expression can be enhanced by the inclusion of enhancers appropriate to the cell system in use.

### Expression Hosts

[0181] The present invention also relates to host cells which are transduced with vectors of the invention, and the production of polypeptides of the invention (including fragments thereof) by recombinant techniques. Host cells are genetically engineered (i.e., nucleic acids are introduced, e.g., transduced, transformed or transfected) with the vectors of this invention, which may be, for example, a cloning vector or an expression vector comprising the relevant nucleic acids herein. The vector is optionally a plasmid, a viral particle, a phage, a naked nucleic acid, etc. The engineered host cells can be cultured in conventional nutrient media modified as appropriate for activating promoters, selecting transformants, or amplifying the relevant gene. The culture conditions, such as temperature, pH and the like, are those previously used with the host cell selected for expression, and will be apparent to those skilled in the art and in the references cited herein, including, Sambrook (1989) and Ausubel (2000).

[0182] The host cell can be a eukaryotic cell such as a yeast cell, or a plant cell, or the host cell can be a prokaryotic cell, such as a bacterial cell. Plant protoplasts are also suitable for some applications. For example, the DNA fragments are introduced into plant tissues, cultured plant cells or plant protoplasts by standard methods including electroporation (Fromm et al. (1985)), infection by viral vectors such as cauliflower mosaic virus (CaMV) (Hohn et al. (1982); U.S. Pat. No. 4,407,956), high velocity ballistic penetration by small particles with the nucleic acid either within the matrix of small beads or particles, or on the surface (Klein et al. (1987)), use of pollen as vector (WO 85/01856), or use of Agrobacterium tumefaciens or A. rhizogenes carrying a T-DNA plasmid in which DNA fragments are cloned. The T-DNA plasmid is transmitted to plant cells upon infection by Agrobacterium tumefaciens, and a portion is stably integrated into the plant genome (Horsch et al. (1984); Fraley et al. (1983)).

[0183] The cell can include a nucleic acid of the invention that encodes a polypeptide, wherein the cell expresses a polypeptide of the invention. The cell can also include vector sequences, or the like. Furthermore, cells and transgenic plants that include any polypeptide or nucleic acid above or throughout this specification, e.g., produced by transduction of a vector of the invention, are an additional feature of the invention.

[0184] For long-term, high-yield production of recombinant proteins, stable expression can be used. Host cells transformed with a nucleotide sequence encoding a polypeptide of the invention are optionally cultured under conditions suitable for the expression and recovery of the encoded protein from cell culture. The protein or fragment thereof produced by a recombinant cell may be secreted, membrane-bound, or contained intracellularly, depending on the sequence and/or the vector used. As will be understood by those of skill in the art, expression vectors containing polynucleotides encoding mature proteins of the invention can be designed with signal sequences which direct secretion of the mature polypeptides through a prokaryotic or eukaryotic cell membrane.

### Modified Amino Acid Residues

[0185] Polypeptides of the invention may contain one or more modified amino acid residues. The presence of modified amino acids may be advantageous in, for example, increasing polypeptide half-life, reducing polypeptide antigenicity or toxicity, increasing polypeptide storage stability, or the like. Amino acid residue(s) are modified, for example, co-translationally or post-translationally during recombinant production or modified by synthetic or chemical means.

[0186] Non-limiting examples of a modified amino acid residue include incorporation or other use of acetylated amino acids, glycosylated amino acids, sulfated amino acids, prenylated (e.g., farnesylated, geranylgeranylated) amino acids, PEG modified (e.g., “PEGylated”) amino acids, biotinylated amino acids, carboxylated amino acids, phosphorylated amino acids, etc. References adequate to guide one of skill in the modification of amino acid residues are replete throughout the literature.

[0187] The modified amino acid residues may prevent or increase affinity of the polypeptide for another molecule, including, but not limited to, polynucleotide, proteins, carbohydrates, lipids and lipid derivatives, and other organic or synthetic compounds.

### Identification of Additional Protein Factors

[0188] A transcription factor provided by the present invention can also be used to identify additional endogenous or exogenous molecules that can affect a phenotype or trait of interest. Such molecules include endogenous molecules that are acted upon either at a transcriptional level by a transcription factor of the invention to modify a phenotype as desired. For example, the transcription factors can be employed to identify one or more downstream genes that are subject to a regulatory effect of the transcription factor. In one approach, a transcription factor or transcription factor homolog of the invention is expressed in a host cell, e.g., a transgenic plant cell, tissue or explant, and expression products, either RNA or protein, of likely or random targets are monitored, e.g., by hybridization to a microarray of nucleic acid probes corresponding to genes expressed in a tissue or cell type of interest, by two-dimensional gel electrophoresis of protein products, or by any other method known in the art for assessing expression of gene products at the level of RNA or protein. Alternatively, a transcription factor of the invention can be used to identify promoter sequences (such as binding sites on DNA sequences) involved in the regulation of a downstream target. After identifying a promoter sequence, interactions between the transcription factor and the promoter sequence can be modified by changing specific nucleotides in the promoter sequence or specific amino acids in the transcription factor that interact with the promoter sequence to alter a plant trait. Typically, transcription factor DNA-binding sites are identified by gel shift assays. After identifying the promoter regions, the promoter region sequences can be employed in double-stranded DNA arrays to identify molecules that affect the interactions of the transcription factors with their promoters (Bulyk et al. (1999)).

[0189] The identified transcription factors are also useful to identify proteins that modify the activity of the transcription factor. Such modification can occur by covalent modification, such as by phosphorylation, or by protein-protein (homo or -heteropolymer) interactions. Any method suitable for detecting protein-protein interactions can be employed. Among the methods that can be employed are co-immunoprecipitation, cross-linking and co-purification through gradients or chromatographic columns, and the two-hybrid yeast system.

[0190] The two-hybrid system detects protein interactions in vivo and is described in Chien et al. (1991) and is commercially available from Clontech (Palo Alto, Calif.). In such a system, plasmids are constructed that encode two hybrid proteins: one consists of the DNA-binding domain of a transcription activator protein fused to the transcription factor polypeptide and the other consists of the transcription activator protein's activation domain fused to an unknown protein that is encoded by a cDNA that has been recombined into the plasmid as part of a cDNA library. The DNA-binding domain fusion plasmid and the cDNA library are transformed into a strain of the yeast Saccharomyces cerevisiae that contains a reporter gene (e.g., lacZ) whose regulatory region contains the transcription activator's binding site. Either hybrid protein alone cannot activate transcription of the reporter gene. Interaction of the two hybrid proteins reconstitutes the functional activator protein and results in expression of the reporter gene, which is detected by an assay for the reporter gene product. Then, the library plasmids responsible for reporter gene expression are isolated and sequenced to identify the proteins encoded by the library plasmids. After identifying proteins that interact with the transcription factors, assays for compounds that interfere with the transcription factor protein-protein interactions can be preformed.

### Subsequences

[0191] Also contemplated are uses of polynucleotides, also referred to herein as oligonucleotides, typically having at least 12 bases, preferably at least 50 bases, which hybridize under stringent conditions to a polynucleotide sequence described above. The polynucleotides may be used as probes, primers, sense and antisense agents, and the like, according to methods as noted above.

[0192] Subsequences of the polynucleotides of the invention, including polynucleotide fragments and oligonucleotides are useful as nucleic acid probes and primers. An oligonucleotide suitable for use as a probe or primer is at least about 15 nucleotides in length, more often at least about 18 nucleotides, often at least about 21 nucleotides, frequently at least about 30 nucleotides, or about 40 nucleotides, or more in length. A nucleic acid probe is useful in hybridization protocols, e.g., to identify additional polypeptide homologs of the invention, including protocols for microarray experiments. Primers can be annealed to a complementary target DNA strand by nucleic acid hybridization to form a hybrid between the primer and the target DNA strand, and then extended along the target DNA strand by a DNA polymerase enzyme. Primer pairs can be used for amplification of a nucleic acid sequence, e.g., by the polymerase chain reaction (PCR) or other nucleic-acid amplification methods. See Sambrook (1989), and Ausubel (2000).

[0193] In addition, the invention includes an isolated or recombinant polypeptide including a subsequence of at least about 15 contiguous amino acids encoded by the recombinant or isolated polynucleotides of the invention. For example, such polypeptides, or domains or fragments thereof, can be used as immunogens, e.g., to produce antibodies specific for the polypeptide sequence, or as probes for detecting a sequence of interest. A subsequence can range in size from about 15 amino acids in length up to and including the full length of the polypeptide.

[0194] To be encompassed by the present invention, an expressed polypeptide which comprises such a polypeptide subsequence performs at least one biological function of the intact polypeptide in substantially the same manner, or to a similar extent, as does the intact polypeptide. For example, a polypeptide fragment can comprise a recognizable structural motif or functional domain such as a DNA binding domain that activates transcription, e.g., by binding to a specific DNA promoter region an activation domain, or a domain for protein-protein interactions.

### Production of Transgenic Plants

[0195] Modification of Traits

[0196] The polynucleotides of the invention are favorably employed to produce transgenic plants with various traits, or characteristics, that have been modified in a desirable manner, e.g., to improve the fruit quality characteristics of a plant. For example, alteration of expression levels or patterns (e.g., spatial or temporal expression patterns) of one or more of the transcription factors (or transcription factor homologs) of the invention, as compared with the levels of the same protein found in a wild-type plant, can be used to modify a plant's traits. An illustrative example of trait modification, improved characteristics, by altering expression levels of a particular transcription factor is described further in the Examples and the Sequence Listing.

[0197] Homologous Genes Introduced into Transgenic Plants.

[0198] Homologous genes that may be derived from any plant, or from any source whether natural, synthetic, semi-synthetic or recombinant, and that share significant sequence identity or similarity to those provided by the present invention, may be introduced into plants, for example, crop plants, to confer desirable or improved traits. Consequently, transgenic plants may be produced that comprise a recombinant expression vector or cassette with a promoter operably linked to one or more sequences homologous to presently disclosed sequences. The promoter may be, for example, a plant or viral promoter.

[0199] The invention thus provides for methods for preparing transgenic plants, and for modifying plant traits. These methods include introducing into a plant a recombinant expression vector or cassette comprising a functional promoter operably linked to one or more sequences homologous to presently disclosed sequences. Plants and kits for producing these plants that result from the application of these methods are also encompassed by the present invention.

Genes, Traits and Utilities that Affect Plant Characteristics

[0200] Plant transcription factors can modulate gene expression, and, in turn, be modulated by the environmental experience of a plant. Significant alterations in a plant's environment invariably result in a change in the plant's transcription factor gene expression pattern. Altered transcription factor expression patterns generally result in phenotypic changes in the plant. Transcription factor gene product(s) in transgenic plants then differ(s) in amounts or proportions from that found in wild-type or non-transformed plants, and those transcription factors likely represent polypeptides that are used to alter the response to the environmental change. By way of example, it is well accepted in the art that analytical methods based on altered expression patterns may be used to screen for phenotypic changes in a plant far more effectively than can be achieved using traditional methods.

Potential Applications of the Presently Disclosed Sequences that Improve Plant Yield and/or Fruit Yield or Quality

[0201] The genes identified by the experiment presently disclosed represent potential regulators of plant yield and/or fruit yield or quality. As such, these genes (or their orthologs and paralogs) can be applied to commercial species in order to produce higher yield and/or quality.

### Antisense and Co-Suppression

[0202] In addition to expression of the nucleic acids of the invention as gene replacement or plant phenotype modification nucleic acids, the nucleic acids are also useful for sense and anti-sense suppression of expression, e.g. to down-regulate expression of a nucleic acid of the invention, e.g. as a further mechanism for modulating plant phenotype. That is, the nucleic acids of the invention, or subsequences or anti-sense sequences thereof, can be used to block expression of naturally occurring homologous nucleic acids. A variety of sense and anti-sense technologies are known in the art, e.g. as set forth in Lichtenstein and Nellen (1997) Antisense Technology: A Practical Approach IRL Press at Oxford University Press, Oxford, U.K. Antisense regulation is also described in Crowley et al. (1985); Rosenberg et al. (1985); Preiss et al. (1985); Melton (1985); Izant and Weintraub (1985); and Kim and Wold (1985). Additional methods for antisense regulation are known in the art. Antisense regulation has been used to reduce or inhibit expression of plant genes in, for example in European Patent Publication No. 271988. Antisense RNA may be used to reduce gene expression to produce a visible or biochemical phenotypic change in a plant (Smith et al. (1988); Smith et al. (1990)). In general, sense or anti-sense sequences are introduced into a cell, where they are optionally amplified, e.g. by transcription. Such sequences include both simple oligonucleotide sequences and catalytic sequences such as ribozymes.

[0203] For example, a reduction or elimination of expression (i.e., a “knock-out”) of a transcription factor or transcription factor homolog polypeptide in a transgenic plant, e.g., to modify a plant trait, can be obtained by introducing an antisense construct corresponding to the polypeptide of interest as a cDNA. For antisense suppression, the transcription factor or homolog cDNA is arranged in reverse orientation (with respect to the coding sequence) relative to the promoter sequence in the expression vector. The introduced sequence need not be the full-length cDNA or gene, and need not be identical to the cDNA or gene found in the plant type to be transformed. Typically, the antisense sequence need only be capable of hybridizing to the target gene or RNA of interest. Thus, where the introduced sequence is of shorter length, a higher degree of homology to the endogenous transcription factor sequence will be needed for effective antisense suppression. While antisense sequences of various lengths can be utilized, preferably, the introduced antisense sequence in the vector will be at least 30 nucleotides in length, and improved antisense suppression will typically be observed as the length of the antisense sequence increases. Preferably, the length of the antisense sequence in the vector will be greater than 100 nucleotides. Transcription of an antisense construct as described results in the production of RNA molecules that are the reverse complement of mRNA molecules transcribed from the endogenous transcription factor gene in the plant cell.

[0204] Suppression of endogenous transcription factor gene expression can also be achieved using RNA interference, or RNAi. RNAi is a post-transcriptional, targeted gene-silencing technique that uses double-stranded RNA (dsRNA) to incite degradation of messenger RNA (mRNA) containing the same sequence as the dsRNA (Constans (2002)). Small interfering RNAs, or siRNAs are produced in at least two steps: an endogenous ribonuclease cleaves longer dsRNA into shorter, 21-23 nucleotide-long RNAs. The siRNA segments then mediate the degradation of the target mRNA (Zamore (2001). RNAi has been used for gene function determination in a manner similar to antisense oligonucleotides (Constans (2002)). Expression vectors that continually express siRNAs in transiently and stably transfected have been engineered to express small hairpin RNAs (shRNAs), which get processed in vivo into siRNAs-like molecules capable of carrying out gene-specific silencing (Brummelkamp et al. (2002), and Paddison, et al. (2002)). Post-transcriptional gene silencing by double-stranded RNA is discussed in further detail by Hammond et al. (2001), Fire et al. (1998) and Timmons and Fire (1998). Vectors in which RNA encoded by a transcription factor or transcription factor homolog cDNA is over-expressed can also be used to obtain co-suppression of a corresponding endogenous gene, e.g., in the manner described in U.S. Pat. No. 5,231,020 to Jorgensen. Such co-suppression (also termed sense suppression) does not require that the entire transcription factor cDNA be introduced into the plant cells, nor does it require that the introduced sequence be exactly identical to the endogenous transcription factor gene of interest. However, as with antisense suppression, the suppressive efficiency will be enhanced as specificity of hybridization is increased, e.g., as the introduced sequence is lengthened, and/or as the sequence similarity between the introduced sequence and the endogenous transcription factor gene is increased.

[0205] Vectors expressing an untranslatable form of the transcription factor mRNA, e.g., sequences comprising one or more stop codon, or nonsense mutation) can also be used to suppress expression of an endogenous transcription factor, thereby reducing or eliminating its activity and modifying one or more traits. Methods for producing such constructs are described in U.S. Pat. No. 5,583,021. Preferably, such constructs are made by introducing a premature stop codon into the transcription factor gene. Alternatively, a plant trait can be modified by gene silencing using double-strand RNA (Sharp (1999)). Another method for abolishing the expression of a gene is by insertion mutagenesis using the T-DNA of Agrobacterium tumefaciens. After generating the insertion mutants, the mutants can be screened to identify those containing the insertion in a transcription factor or transcription factor homolog gene. Plants containing a single transgene insertion event at the desired gene can be crossed to generate homozygous plants for the mutation. Such methods are well known to those of skill in the art (see for example Koncz et al. (1992a, 1992b)).

[0206] Alternatively, a plant phenotype can be altered by eliminating an endogenous gene, such as a transcription factor or transcription factor homolog, e.g., by homologous recombination (Kempin et al. (1997)).

[0207] A plant trait can also be modified by using the Cre-lox system (for example, as described in U.S. Pat. No. 5,658,772). A plant genome can be modified to include first and second lox sites that are then contacted with a Cre recombinase. If the lox sites are in the same orientation, the intervening DNA sequence between the two sites is excised. If the lox sites are in the opposite orientation, the intervening sequence is inverted.

[0208] The polynucleotides and polypeptides of this invention can also be expressed in a plant in the absence of an expression cassette by manipulating the activity or expression level of the endogenous gene by other means, such as, for example, by ectopically expressing a gene by T-DNA activation tagging (Ichikawa et al. (1997); Kakimoto et al. (1996)). This method entails transforming a plant with a gene tag containing multiple transcriptional enhancers and once the tag has inserted into the genome, expression of a flanking gene coding sequence becomes deregulated. In another example, the transcriptional machinery in a plant can be modified so as to increase transcription levels of a polynucleotide of the invention (see, e.g., PCT Publications WO 96/06166 and WO 98/53057 which describe the modification of the DNA-binding specificity of zinc finger proteins by changing particular amino acids in the DNA-binding motif).

[0209] The transgenic plant can also include the machinery necessary for expressing or altering the activity of a polypeptide encoded by an endogenous gene, for example, by altering the phosphorylation state of the polypeptide to maintain it in an activated state.

[0210] Transgenic plants (or plant cells, or plant explants, or plant tissues) incorporating the polynucleotides of the invention and/or expressing the polypeptides of the invention can be produced by a variety of well established techniques as described above. Following construction of a vector, most typically an expression cassette, including a polynucleotide, e.g., encoding a transcription factor or transcription factor homolog, of the invention, standard techniques can be used to introduce the polynucleotide into a plant, a plant cell, a plant explant or a plant tissue of interest. Optionally, the plant cell, explant or tissue can be regenerated to produce a transgenic plant.

[0211] The plant can be any higher plant, including gymnosperms, monocotyledonous and dicotyledonous plants. Suitable protocols are available for Leguminosae (alfalfa, soybean, clover, etc.), Umbelliferae (carrot, celery, parsnip), Cruciferae (cabbage, radish, rapeseed, broccoli, etc.), Curcurbitaceae (melons and cucumber), Gramineae (wheat, corn, rice, barley, millet, etc.), Solanaceae (potato, tomato, tobacco, peppers, etc.), and various other crops. See protocols described in Ammirato et al. (1984); Shimamoto et al. (1989); Fromm et al. (1990); and Vasil et al. (1990).

[0212] Transformation and regeneration of both monocotyledonous and dicotyledonous plant cells is now routine, and the selection of the most appropriate transformation technique will be determined by the practitioner. The choice of method will vary with the type of plant to be transformed; those skilled in the art will recognize the suitability of particular methods for given plant types. Suitable methods can include, but are not limited to: electroporation of plant protoplasts; liposome-mediated transformation; polyethylene glycol (PEG) mediated transformation; transformation using viruses; micro-injection of plant cells; micro-projectile bombardment of plant cells; vacuum infiltration; and Agrobacterium tumefaciens mediated transformation. Transformation means introducing a nucleotide sequence into a plant in a manner to cause stable or transient expression of the sequence.

[0213] Successful examples of the modification of plant characteristics by transformation with cloned sequences which serve to illustrate the current knowledge in this field of technology, and which are herein incorporated by reference, include: U.S. Pat. Nos. 5,571,706; 5,677,175; 5,510,471; 5,750,386; 5,597,945; 5,589,615; 5,750,871; 5,268,526; 5,780,708; 5,538,880; 5,773,269; 5,736,369 and 5,610,042.

[0214] Following transformation, plants are preferably selected using a dominant selectable marker incorporated into the transformation vector. Typically, such a marker will confer antibiotic or herbicide resistance on the transformed plants, and selection of transformants can be accomplished by exposing the plants to appropriate concentrations of the antibiotic or herbicide.

[0215] After transformed plants are selected and grown to maturity, those plants showing a modified trait are identified using methods well known in the art that are specifically directed to improved fruit or yield characteristics. Methods that may be used are provided in Examples II through VI. The modified trait can be any of those traits described above. Additionally, to confirm that the modified trait is due to changes in expression levels or activity of the polypeptide or polynucleotide of the invention can be determined by analyzing mRNA expression using Northern blots, RT-PCR or microarrays, or protein expression using immunoblots or Western blots or gel shift assays.

### Integrated Systems—Sequence Identity

[0216] Additionally, the present invention may be an integrated system, computer or computer readable medium that comprises an instruction set for determining the identity of one or more sequences in a database. In addition, the instruction set can be used to generate or identify sequences that meet any specified criteria. Furthermore, the instruction set may be used to associate or link certain functional benefits, such improved characteristics, with one or more identified sequence.

[0217] For example, the instruction set can include, e.g., a sequence comparison or other alignment program, e.g., an available program such as, for example, the Wisconsin Package Version 10.0, such as BLAST, FASTA, PILEUP, FINDPATTERNS or the like (GCG, Madison, Wis.). Public sequence databases such as GenBank, EMBL, Swiss-Prot and PIR or private sequence databases such as PHYTOSEQ sequence database (Incyte Genomics, Wilmington, Del.) can be searched.

[0218] Alignment of sequences for comparison can be conducted by the local homology algorithm of Smith and Waterman (1981), by the homology alignment algorithm of Needleman and Wunsch (1970, by the search for similarity method of Pearson and Lipman (1988), or by computerized implementations of these algorithms. After alignment, sequence comparisons between two (or more) polynucleotides or polypeptides are typically performed by comparing sequences of the two sequences over a comparison window to identify and compare local regions of sequence similarity. The comparison window can be a segment of at least about 20 contiguous positions, usually about 50 to about 200, more usually about 100 to about 150 contiguous positions. A description of the method is provided in Ausubel (2000).

[0219] A variety of methods for determining sequence relationships can be used, including manual alignment and computer assisted sequence alignment and analysis. This later approach is a preferred approach in the present invention, due to the increased throughput afforded by computer assisted methods. As noted above, a variety of computer programs for performing sequence alignment are available, or can be produced by one of skill.

[0220] One example algorithm that is suitable for determining percent sequence identity and sequence similarity is the BLAST algorithm, which is described in Altschul et al. (1990). Software for performing BLAST analyses is publicly available, e.g., through the National Library of Medicine's National Center for Biotechnology Information (ncbi.nlm.nih; see at world wide web (www) National Institutes of Health US government (gov) website). This algorithm involves first identifying high scoring sequence pairs (HSPs) by identifying short words of length W in the query sequence, which either match or satisfy some positive-valued threshold score T when aligned with a word of the same length in a database sequence. T is referred to as the neighborhood word score threshold (Altschul (2000)). These initial neighborhood word hits act as seeds for initiating searches to find longer HSPs containing them. The word hits are then extended in both directions along each sequence for as far as the cumulative alignment score can be increased. Cumulative scores are calculated using, for nucleotide sequences, the parameters M (reward score for a pair of matching residues; always >0) and N (penalty score for mismatching residues; always <0). For amino acid sequences, a scoring matrix is used to calculate the cumulative score. Extension of the word hits in each direction are halted when: the cumulative alignment score falls off by the quantity X from its maximum achieved value; the cumulative score goes to zero or below, due to the accumulation of one or more negative-scoring residue alignments; or the end of either sequence is reached. The BLAST algorithm parameters W, T, and X determine the sensitivity and speed of the alignment. The BLASTN program (for nucleotide sequences) uses as defaults a wordlength (W) of 11, an expectation (E) of 10, a cutoff of 100, M=5, N=4, and a comparison of both strands. For amino acid sequences, the BLASTP program uses as defaults a wordlength (W) of 3, an expectation (E) of 10, and the BLOSUM62 scoring matrix (see Henikoff and Henikoff (1992)). Unless otherwise indicated, “sequence identity” here refers to the % sequence identity generated from a tblastx using the NCBI version of the algorithm at the default settings using gapped alignments with the filter “off” (see, for example, NIH NLM NCBI website at ncbi.nlm.nih).

[0221] In addition to calculating percent sequence identity, the BLAST algorithm also performs a statistical analysis of the similarity between two sequences (see, e.g. Karlin and Altschul (1993)). One measure of similarity provided by the BLAST algorithm is the smallest sum probability (P(N)), which provides an indication of the probability by which a match between two nucleotide or amino acid sequences would occur by chance. For example, a nucleic acid is considered similar to a reference sequence (and, therefore, in this context, homologous) if the smallest sum probability in a comparison of the test nucleic acid to the reference nucleic acid is less than about 0.1, or less than about 0.01, and or even less than about 0.001. An additional example of a useful sequence alignment algorithm is PILEUP. PILEUP creates a multiple sequence alignment from a group of related sequences using progressive, pairwise alignments. The program can align, e.g., up to 300 sequences of a maximum length of 5,000 letters.

[0222] The integrated system, or computer typically includes a user input interface allowing a user to selectively view one or more sequence records corresponding to the one or more character strings, as well as an instruction set which aligns the one or more character strings with each other or with an additional character string to identify one or more region of sequence similarity. The system may include a link of one or more character strings with a particular phenotype or gene function. Typically, the system includes a user readable output element that displays an alignment produced by the alignment instruction set.

[0223] The methods of this invention can be implemented in a localized or distributed computing environment. In a distributed environment, the methods may be implemented on a single computer comprising multiple processors or on a multiplicity of computers. The computers can be linked, e.g. through a common bus, but more preferably the computer(s) are nodes on a network. The network can be a generalized or a dedicated local or wide-area network and, in certain preferred embodiments, the computers may be components of an intra-net or an internet.

[0224] Thus, the invention provides methods for identifying a sequence similar or homologous to one or more polynucleotides as noted herein, or one or more target polypeptides encoded by the polynucleotides, or otherwise noted herein and may include linking or associating a given plant phenotype or gene function with a sequence. In the methods, a sequence database is provided (locally or across an inter or intra net) and a query is made against the sequence database using the relevant sequences herein and associated plant phenotypes or gene functions.

[0225] Any sequence herein can be entered into the database, before or after querying the database. This provides for both expansion of the database and, if done before the querying step, for insertion of control sequences into the database. The control sequences can be detected by the query to ensure the general integrity of both the database and the query. As noted, the query can be performed using a web browser based interface. For example, the database can be a centralized public database such as those noted herein, and the querying can be done from a remote terminal or computer across an internet or intranet.

[0226] Any sequence herein can be used to identify a similar, homologous, paralogous, or orthologous sequence in another plant. This provides means for identifying endogenous sequences in other plants that may be useful to alter a trait of progeny plants, which results from crossing two plants of different strain. For example, sequences that encode an ortholog of any of the sequences herein that naturally occur in a plant with a desired trait can be identified using the sequences disclosed herein. The plant is then crossed with a second plant of the same species but which does not have the desired trait to produce progeny which can then be used in further crossing experiments to produce the desired trait in the second plant. Therefore the resulting progeny plant contains no transgenes; expression of the endogenous sequence may also be regulated by treatment with a particular chemical or other means, such as EMR. Some examples of such compounds well known in the art include: ethylene; cytokinins; phenolic compounds, which stimulate the transcription of the genes needed for infection; specific monosaccharides and acidic environments which potentiate vir gene induction; acidic polysaccharides which induce one or more chromosomal genes; and opines; other mechanisms include light or dark treatment (for a review of examples of such treatments, see Winans (1992), Eyal et al. (1992), Chrispeels et al. (2000), or Piazza et al. (2002)).

[0227] Table 5 categorizes sequences within the National Center for Biotechnology Information (NCBI) UniGene database determined to be orthologous to many of the transcription factor sequences of the present invention. The column headings include the transcription factors listed by (a) the SEQ ID NO: of each Clade Identifier; (b) the Clade Identifier (the “reference” Arabidopsis Gene Identifier (GID) used to identify each clade); (c) the AGI Identifier for each Clade Identifier; (d) the UniGene identifier for each orthologous sequence identified in this study; (e) SEQ ID NO: of the ortholog found in the UniGene database (these public sequences are not provided in the Sequence Listing but are expected to function similarly to the respective Clade Identifiers based on sequence similarity, including similarity within the conserved domains); (f) the species in which the orthologs to the transcription factors are found; (g) the smallest sum probability relationship of the homologous sequence to Arabidopsis Clade Identifier sequence in a given row, determined by BLAST analysis, and (h) the percentage identity of the ortholog found in the UniGene database to the Clade Identifier.

TABLE 5
Orthologs of Representative Arabidopsis Transcription Factor Genes Identified Using BLAST Analysis

| Clade | | AGI | | | | | % Identify |
|---|---|---|---|---|---|---|---|
| Identifier | Clade | Identifier | | Ortholog | | | of Ortholog |
| SEQ ID | Identifier | for Clade | UniGene | SEQ | | | to Clade |
| NO: | (GID) | Identifier | Identifier | ID NO: | Species | p-Value | Identifier |
| 1 | G3 | AT1G46768 | Gma_S4867812 | 437 | Glycine max | 8.00E−29 | 54% |
| 1 | G3 | AT1G46768 | Gma_S4919945 | 438 | Glycine max | 2.00E−27 | 59% |
| 1 | G3 | AT1G46768 | Lsa_S18816809 | 709 | Lactuca sativa | 9.00E−12 | 53% |
| 3 | G22 | AT2G44840 | Gma_S5146194 | 439 | Glycine max | 3.00E−30 | 58% |
| 3 | G22 | AT2G44840 | Hv_S8652 | 488 | Hordeum vulgare | 7.00E−08 | 49% |
| 3 | G22 | AT2G44840 | Lsa_S18782253 | 710 | Lactuca sativa | 6.00E−27 | 65% |
| 3 | G22 | AT2G44840 | Lco_S19325549 | 737 | Lotus corniculatus | 2.00E−27 | 66% |
| 3 | G22 | AT2G44840 | Lco_S19424678 | 738 | Lotus corniculatus | 7.00E−14 | 40% |
| 3 | G22 | AT2G44840 | Les_S5295747 | 574 | Lycopersicon esculentum | 1.00E−53 | 54% |
| 3 | G22 | AT2G44840 | SGN-UNIGENE-47863 | 581 | Lycopersicon esculentum | 2.00E−53 | 54% |
| 3 | G22 | AT2G44840 | SGN-UNIGENE-SINGLET-65809 | 582 | Lycopersicon esculentum | 1.00E−45 | 60% |
| 3 | G22 | AT2G44840 | Mtr_S5317111 | 476 | Medicago truncatula | 2.00E−28 | 61% |
| 3 | G22 | AT2G44840 | Ppa_S17591179 | 807 | Physcomitrel la patens | 3.00E−26 | 64% |
| 3 | G22 | AT2G44840 | Ppa_S17606123 | 808 | Physcomitrel la patens | 2.00E−26 | 78% |
| 3 | G22 | AT2G44840 | Ppa_S17633322 | 809 | Physcomitrel la patens | 7.00E−26 | 63% |
| 3 | G22 | AT2G44840 | Pta_S16845454 | 690 | Pinus taeda | 1.00E−26 | 55% |
| 3 | G22 | AT2G44840 | Stu_S18122190 | 783 | Solanum tuberosum | 1.00E−54 | 54% |
| 3 | G22 | AT2G44840 | Stu_S18128192 | 784 | Solanum tuberosum | 1.00E−53 | 54% |
| 3 | G22 | AT2G44840 | Vvi_S15422284 | 661 | Vitis vinifera | 6.00E−33 | 51% |
| 3 | G22 | AT2G44840 | Zm_S11434059 | 502 | Zea mays | 1.00E−06 | 48% |
| 5 | G24 | AT2G23340 | Gma_S5071803 | 440 | Glycine max | 3.00E−40 | 55% |
| 5 | G24 | AT2G23340 | Han_S18753000 | 704 | Helianthus annuus | 2.00E−42 | 61% |
| 5 | G24 | AT2G23340 | SGN-UNIGENE-49683 | 583 | Lycopersicon esculentum | 1.00E−14 | 42% |
| 5 | G24 | AT2G23340 | SGN-UNIGENE-54594 | 584 | Lycopersican esculentum | 4.00E−41 | 53% |
| 5 | G24 | AT2G23340 | SGN-UNIGENE-SINGLET-47313 | 585 | Lycopersicon esculentum | 1.00E−19 | 72% |
| 5 | G24 | AT2G23340 | Os_S32369 | 403 | Oryza sativa | 1.00E−13 | 43% |
| 5 | G24 | AT2G23340 | Os_S80194 | 404 | Oryza sativa | 4.00E−08 | 59% |
| 5 | G24 | AT2G23340 | Stu_S18119664 | 785 | Solanum tuberosum | 1.00E−23 | 75% |
| 5 | G24 | AT2G23340 | Sbi_S19492185 | 761 | Sorghum bicolor | 2.00E−06 | 37% |
| 5 | G24 | AT2G23340 | Vvi_S15370190 | 662 | Vitis vinifera | 1.00E−38 | 52% |
| 5 | G24 | AT2G23340 | Vvi_S16806812 | 663 | Vitis vinifera | 6.00E−25 | 55% |
| 9 | G156 | AT5G23260 | SGN-UNIGENE-54690 | 586 | Lycopersicon esculentum | 5.00E−40 | 49% |
| 13 | G187 | AT4G18170 | Zm_S11434549 | 503 | Zea mays | 4.00E−34 | 74% |
| 17 | G226 | AT2G30420 | Gma_S4892930 | 441 | Glycine max | 2.00E−06 | 72% |
| 17 | G226 | AT2G30420 | Gma_S4901946 | 442 | Glycine max | 0.004 | 76% |
| 17 | G226 | AT2G30420 | Ptp_S17966041 | 725 | Populus tremula x | 2.00E−12 | 54% |
| | | | | | Populus tremuloides | | |
| 17 | G226 | AT2G30420 | Ta_S45274 | 543 | Triticum aestivum | 3.00E−14 | 57% |
| 17 | G226 | AT2G30420 | Vvi_S15356289 | 664 | Vitis vinifera | 2.00E−30 | 76% |
| 17 | G226 | AT2G30420 | Vvi_S16820566 | 665 | Vitis vinifera | 3.00E−12 | 56% |
| 19 | G237 | AT4G25560 | Zm_S11529151 | 504 | Zea mays | 3.00E−13 | 69% |
| 21 | G270 | AT5G66055 | Gma_S4950212 | 443 | Glycine max | 3.00E−59 | 61% |
| 21 | G270 | AT5G66055 | Lsa_S18811068 | 711 | Lactuca sativa | 1.00E−76 | 55% |
| 21 | G270 | AT5G66055 | SGN-UNIGENE-51108 | 587 | Lycopersicon esculentum | 9.00E−28 | 35% |
| 21 | G270 | AT5G66055 | SGN-UNIGENE-51109 | 588 | Lycopersicon esculentum | 7.00E−19 | 34% |
| 21 | G270 | AT5G66055 | SGN-UNIGENE-SINGLET-39801 | 589 | Lycopersicon esculentum | 1.00E−51 | 70% |
| 21 | G270 | AT5G66055 | Stu_S14633069 | 787 | Solanum tuberosum | 3.00E−42 | 71% |
| 21 | G270 | AT5G66055 | Zm_S11522249 | 505 | Zea mays | 2.00E−57 | 63% |
| 23 | G328 | AT5G15850 | Gma_S4909503 | 444 | Glycine max | 6.00E−05 | 63% |
| 23 | G328 | AT5G15850 | Hv_S210900 | 489 | Hordeum vulgare | 1.00E−40 | 32% |
| 23 | G328 | AT5G15850 | Hv_S210901 | 490 | Hordeum vulgare | 1.00E−43 | 36% |
| 23 | G328 | AT5G15850 | SGN-UNIGENE-52452 | 590 | Lycopersicon esculentum | 3.00E−58 | 50% |
| 23 | G328 | AT5G15850 | SGN-UNIGENE-58595 | 591 | Lycopersicon esculentum | 6.00E−31 | 67% |
| 23 | G328 | AT5G15850 | Mtr_S5441621 | 477 | Medicago truncatula | 2.00E−40 | 64% |
| 23 | G328 | AT5G15850 | Os_S108164 | 407 | Oryza sativa | 4.00E−10 | 53% |
| 23 | G328 | AT5G15850 | Os_S60493 | 408 | Oryza sativa | 3.00E−47 | 37% |
| 23 | G328 | AT5G15850 | Os_S63686 | 409 | Oryza sativa | 2.00E−77 | 45% |
| 23 | G328 | AT5G15850 | Ppa_S17598269 | 811 | Physcomitrel la patens | 9.00E−28 | 53% |
| 23 | G328 | AT5G15850 | Ppa_S17623794 | 812 | Physcomitrel la patens | 9.00E−20 | 60% |
| 23 | G328 | AT5G15850 | Ptp_S17915054 | 726 | Populus tremula x | 3.00E−46 | 60% |
| | | | | | Populus tremuloides | | |
| 23 | G328 | AT5G15850 | Stu_S18109267 | 788 | Solanum tuberosum | 3.00E−30 | 72% |
| 23 | G328 | AT5G15850 | Ta_S344859 | 544 | Triticum aestivum | 0.55 | 33% |
| 23 | G328 | AT5G15850 | Ta_S378085 | 545 | Triticum aestivum | 4.00E−16 | 55% |
| 23 | G328 | AT5G15850 | Ta_S60632 | 546 | Triticum aestivum | 2.00E−12 | 59% |
| 23 | G328 | AT5G15850 | Vvi_S15370390 | 666 | Vitis vinifera | 5.00E−38 | 72% |
| 23 | G328 | AT5G15850 | Vvi_S16866787 | 667 | Vitis vinifera | 1.00E−57 | 57% |
| 23 | G328 | AT5G15850 | Zm_S11527431 | 506 | Zea mays | 4.00E−24 | 52% |
| 25 | G363 | AT1G66140 | Gma_S4865156 | 445 | Glycine max | 0.004 | 30% |
| 25 | G363 | AT1G66140 | Gma_S4916522 | 446 | Glycine max | 8.00E−21 | 45% |
| 25 | G363 | AT1G66140 | Gma_S5129767 | 447 | Glycine max | 1.00E−10 | 31% |
| 25 | G363 | AT1G66140 | Han_S18753949 | 705 | Helianthus annuus | 4.00E−10 | 39% |
| 25 | G363 | AT1G66140 | Lco_S19421621 | 739 | Lotus corniculatus | 0.003 | 32% |
| 25 | G363 | AT1G66140 | SGN-UNIGENE-50506 | 592 | Lycopersicon esculentum | 1.00E−29 | 45% |
| 25 | G363 | AT1G66140 | SGN-UNIGENE-50507 | 593 | Lycopersicon esculentum | 0.052 | 41% |
| 25 | G363 | AT1G66140 | Stu_S18124970 | 789 | Solanum tuberosum | 2.00E−40 | 44% |
| 25 | G363 | AT1G66140 | Stu_S18130146 | 790 | Solanum tuberosum | 5.00E−43 | 44% |
| 25 | G363 | AT1G66140 | Vvi_S16866946 | 668 | Vitis vinifera | 3.00E−17 | 33% |
| 25 | G363 | AT1G66140 | Vvi_S16868836 | 669 | Vitis vinifera | 1.00E−42 | 43% |
| 25 | G363 | AT1G66140 | Zm_S11443746 | 507 | Zea mays | 8.00E−23 | 42% |
| 29 | G435 | AT5G53980 | SGN-UNIGENE-SINGLET-385221 | 594 | Lycopersicon esculentum | 1.00E−24 | 42% |
| 31 | G450 | AT4G14550 | Gma_S4866223 | 448 | Glycine max | 3.00E−42 | 52% |
| 31 | G450 | AT4G14550 | Gma_S4868219 | 449 | Glycine max | 1.00E−44 | 41% |
| 31 | G450 | AT4G14550 | Gma_S4871358 | 450 | Glycine max | 0.01 | 94% |
| 31 | G450 | AT4G14550 | Gma_S4878791 | 451 | Glycine max | 2.00E−47 | 63% |
| 31 | G450 | AT4G14550 | Gma_S5052530 | 452 | Glycine max | 3.00E−21 | 62% |
| 31 | G450 | AT4G14550 | Gma_S5079574 | 453 | Glycine max | 4.00E−62 | 69% |
| 31 | G450 | AT4G14550 | Gma_S5146462 | 454 | Glycine max | 5.00E−36 | 55% |
| 31 | G450 | AT4G14550 | Gma_S5146870 | 455 | Glycine max | 4.00E−73 | 61% |
| 31 | G450 | AT4G14550 | Han_S18710127 | 706 | Helianthus annuus | 2.00E−56 | 75% |
| 31 | G450 | AT4G14550 | Hv_S5546 | 491 | Hordeum vulgare | 1.00E−11 | 69% |
| 31 | G450 | AT4G14550 | Hv_S65240 | 492 | Hordeum vulgare | 1.00E−36 | 45% |
| 31 | G450 | AT4G14550 | Hv_S68291 | 493 | Hordeum vulgare | 8.00E−52 | 67% |
| 31 | G450 | AT4G14550 | Hv_S69191 | 494 | Hordeum vulgare | 1.00E−55 | 55% |
| 31 | G450 | AT4G14550 | Lsa_S18800753 | 712 | Lactuca sativa | 8.00E−19 | 88% |
| 31 | G450 | AT4G14550 | Lsa_S18822784 | 713 | Lactuca sativa | 8.00E−80 | 70% |
| 31 | G450 | AT4G14550 | Lco_S19280850 | 740 | Lotus corniculatus | 3.00E−30 | 48% |
| 31 | G450 | AT4G14550 | Lco_S19282187 | 741 | Lotus corniculatus | 2.00E−35 | 91% |
| 31 | G450 | AT4G14550 | Lco_S19284100 | 742 | Lotus corniculatus | 3.00E−41 | 58% |
| 31 | G450 | AT4G14550 | Lco_S19307099 | 743 | Lotus corniculatus | 2.00E−31 | 53% |
| 31 | G450 | AT4G14550 | Lco_S19373911 | 744 | Lotus corniculatus | 4.00E−29 | 84% |
| 31 | G450 | AT4G14550 | Lco_S19399973 | 745 | Lotus corniculatus | 5.00E−19 | 88% |
| 31 | G450 | AT4G14550 | Lco_S19414267 | 746 | Lotus corniculatus | 3.00E−13 | 67% |
| 31 | G450 | AT4G14550 | Lco_S19457695 | 747 | Lotus corniculatus | 5.00E−41 | 60% |
| 31 | G450 | AT4G14550 | Lco_S19458479 | 748 | Lotus corniculatus | 2.00E−05 | 87% |
| 31 | G450 | AT4G14550 | Les_S5267807 | 575 | Lycopersicon esculentum | 5.00E−10 | 71% |
| 31 | G450 | AT4G14550 | Les_S5295354 | 576 | Lycopersicon esculentum | 8.00E−25 | 56% |
| 31 | G450 | AT4G14550 | Les_S5295355 | 577 | Lycopersicon esculentum | 4.00E−34 | 66% |
| 31 | G450 | AT4G14550 | Les_S5295425 | 578 | Lycopersicon esculentum | 5.00E−14 | 88% |
| 31 | G450 | AT4G14550 | SGN-UNIGENE-46256 | 595 | Lycopersicon esculentum | 2.00E−82 | 64% |
| 31 | G450 | AT4G14550 | SGN-UNIGENE-46318 | 596 | Lycopersicon esculentum | 4.00E−64 | 62% |
| 31 | G450 | AT4G14550 | SGN-UNIGENE-48967 | 597 | Lycopersicon esculentum | 5.00E−54 | 50% |
| 31 | G450 | AT4G14550 | SGN-UNIGENE-58998 | 598 | Lycopersicon esculentum | 0.056 | 71% |
| 31 | G450 | AT4G14550 | SGN-UNIGENE-SINGLET-355280 | 599 | Lycopersicon esculentum | 7.00E−56 | 57% |
| 31 | G450 | AT4G14550 | SGN-UNIGENE-SINGLET-393131 | 600 | Lycopersicon esculentum | 2.00E−81 | 67% |
| 31 | G450 | AT4G14550 | Mtr_S16420818 | 478 | Medicago truncatula | 6.00E−64 | 62% |
| 31 | G450 | AT4G14550 | Mtr_S5409604 | 479 | Medicago truncatula | 8.00E−36 | 87% |
| 31 | G450 | AT4G14550 | Mtr_S5443886 | 480 | Medicago truncatula | 3.00E−26 | 76% |
| 31 | G450 | AT4G14550 | Os_S106147 | 411 | Oryza sativa | 2.00E−09 | 73% |
| 31 | G450 | AT4G14550 | Os_S55790 | 413 | Oryza sativa | 7.00E−16 | 66% |
| 31 | G450 | AT4G14550 | Os_S83247 | 414 | Oryza sativa | 1.00E−59 | 54% |
| 31 | G450 | AT4G14550 | Ppa_S17639899 | 813 | Physcomitrel la patens | 4.00E−32 | 42% |
| 31 | G450 | AT4G14550 | Ppa_S17639910 | 814 | Physcomitrel la patens | 3.00E−32 | 42% |
| 31 | G450 | AT4G14550 | Pta_S16175974 | 692 | Pinus taeda | 2.00E−51 | 48% |
| 31 | G450 | AT4G14550 | Pta_S16175975 | 693 | Pinus taeda | 3.00E−53 | 47% |
| 31 | G450 | AT4G14550 | Pta_S16175977 | 694 | Pinus taeda | 2.00E−49 | 47% |
| 31 | G450 | AT4G14550 | Pta_S16792071 | 695 | Pinus taeda | 8.00E−27 | 83% |
| 31 | G450 | AT4G14550 | Ptp_S17971671 | 727 | Populus tremula x | 8.00E−87 | 68% |
| | | | | | Populus tremuloides | | |
| 31 | G450 | AT4G14550 | Ptp_S17971673 | 728 | Populus tremula x | 3.00E−75 | 56% |
| | | | | | Populus tremuloides | | |
| 31 | G450 | AT4G14550 | Ptp_S17971674 | 729 | Populus tremula x | 1.00E−84 | 63% |
| | | | | | Populus tremuloides | | |
| 31 | G450 | AT4G14550 | Sof_S17381655 | 773 | Saccharum officinarum | 5.00E−07 | 50% |
| 31 | G450 | AT4G14550 | Stu_S18110580 | 791 | Solanum tuberosum | 8.00E−89 | 70% |
| 31 | G450 | AT4G14550 | Stu_S18128606 | 792 | Solanum tuberosum | 2.00E−82 | 67% |
| 31 | G450 | AT4G14550 | Sbi_S19502140 | 763 | Sorghum tuberosum | 2.00E−53 | 49% |
| 31 | G450 | AT4G14550 | Sbi_S19503070 | 764 | Sorghum bicolor | 3.00E−46 | 61% |
| 31 | G450 | AT4G14550 | Ta_S106537 | 547 | Triticum aestivum | 5.00E−33 | 59% |
| 31 | G450 | AT4G14550 | Ta_S214840 | 548 | Triticum aestivum | 7.00E−51 | 63% |
| 31 | G450 | AT4G14550 | Ta_S280029 | 549 | Triticum aestivum | 1.00E−22 | 39% |
| 31 | G450 | AT4G14550 | Ta_S300894 | 550 | Triticum aestivum | 3.00E−06 | 91% |
| 31 | G450 | AT4G14550 | Ta_S310132 | 552 | Triticum aestivum | 7.00E−23 | 80% |
| 31 | G450 | AT4G14550 | Ta_S321320 | 553 | Triticum aestivum | 2.00E−39 | 68% |
| 31 | G450 | AT4G14550 | Ta_S41569 | 554 | Triticum aestivum | 5.00E−50 | 67% |
| 31 | G450 | AT4G14550 | Ta_S51749 | 555 | Triticum aestivum | 1.00E−20 | 41% |
| 31 | G450 | AT4G14550 | Ta_S91137 | 556 | Triticum aestivum | 3.00E−10 | 80% |
| 31 | G450 | AT4G14550 | Vvi_S15400916 | 670 | Vitis vinifera | 1.00E−57 | 86% |
| 31 | G450 | AT4G14550 | Vvi_S15406370 | 671 | Vitis vinifera | 3.00E−09 | 86% |
| 31 | G450 | AT4G14550 | Vvi_S15428140 | 672 | Vitis vinifera | 5.00E−50 | 49% |
| 31 | G450 | AT4G14550 | Vvi_S16806965 | 673 | Vitis vinifera | 3.00E−43 | 75% |
| 31 | G450 | AT4G14550 | Vvi_S16871545 | 674 | Vitis vinifera | 1.00E−89 | 72% |
| 31 | G450 | AT4G14550 | Zm_S11324536 | 508 | Zea mays | 9.00E−31 | 41% |
| 31 | G450 | AT4G14550 | Zm_S11451126 | 510 | Zea mays | 2.00E−17 | 78% |
| 31 | G450 | AT4G14550 | Zm_S11451156 | 511 | Zea mays | 2.00E−46 | 56% |
| 31 | G450 | AT4G14550 | Zm_S11527890 | 512 | Zea mays | 2.00E−45 | 53% |
| 31 | G450 | AT4G14550 | Zm_S11528788 | 513 | Zea mays | 5.00E−77 | 59% |
| 33 | G522 | AT4G36160 | Lco_S19461175 | 749 | Lotus corniculatus | 2.00E−04 | 31% |
| 33 | G522 | AT4G36160 | SGN-UNIGENE-SINGLET-397751 | 601 | Lycopersicon esculentum | 6.00E−80 | 60% |
| 33 | G522 | AT4G36160 | Pta_S15762497 | 696 | Pinus taeda | 3.00E−30 | 76% |
| 33 | G522 | AT4G36160 | Pta_S15777524 | 697 | Pinus taeda | 1.00E−68 | 81% |
| 33 | G522 | AT4G36160 | Zm_S11327546 | 514 | Zea mays | 3.00E−07 | 34% |
| 37 | G558 | AT5G06950 | Gma_S4902665 | 456 | Glycine max | 3.00E−19 | 88% |
| 37 | G558 | AT5G06950 | Gma_S4911209 | 457 | Glycine max | 6.00E−65 | 82% |
| 37 | G558 | AT5G06950 | Gma_S4975330 | 458 | Glycine max | 2.00E−52 | 79% |
| 37 | G558 | AT5G06950 | Gma_S5146796 | 459 | Glycine max | 1.00E−139 | 69% |
| 37 | G558 | AT5G06950 | Hv_S227616 | 495 | Hordeum vulgare | 2.00E−42 | 84% |
| 37 | G558 | AT5G06950 | Hv_S27170 | 496 | Hordeum vulgare | 4.00E−52 | 51% |
| 37 | G558 | AT5G06950 | Lsa_S18776116 | 714 | Lactuca sativa | 4.00E−82 | 64% |
| 37 | G558 | AT5G06950 | Lsa_S18777336 | 715 | Lactuca sativa | 8.00E−67 | 54% |
| 37 | G558 | AT5G06950 | Lco_S19286074 | 750 | Lotus corniculatus | 1.00E−18 | 84% |
| 37 | G558 | AT5G06950 | Lco_S19343385 | 751 | Lotus corniculatus | 2.00E−12 | 91% |
| 37 | G558 | AT5G06950 | Les_S5295407 | 579 | Lycopersicon esculentum | 1.00E−120 | 59% |
| 37 | G558 | AT5G06950 | Les_S5295673 | 580 | Lycopersicon esculentum | 9.00E−99 | 75% |
| 37 | G558 | AT5G06950 | SGN-UNIGENE-46372 | 602 | Lycopersicon esculentum | 3.00E−78 | 60% |
| 37 | G558 | AT5G06950 | SGN-UNIGENE-46373 | 603 | Lycopersicon esculentum | 1.00E−134 | 75% |
| 37 | G558 | AT5G06950 | SGN-UNIGENE-47327 | 604 | Lycopersicon esculentum | 1.00E−139 | 78% |
| 37 | G558 | AT5G06950 | SGN-UNIGENE-49500 | 605 | Lycopersicon esculentum | 9.00E−51 | 76% |
| 37 | G558 | AT5G06950 | SGN-UNIGENE-50258 | 606 | Lycopersicon esculentum | 4.00E−89 | 54% |
| 37 | G558 | AT5G06950 | SGN-UNIGENE-57605 | 607 | Lycopersicon esculentum | 4.00E−06 | 76% |
| 37 | G558 | AT5G06950 | SGN-UNIGENE-57705 | 608 | Lycopersicon esculentum | 3.00E−84 | 56% |
| 37 | G558 | AT5G06950 | SGN-UNIGENE-58538 | 609 | Lycopersicon esculentum | 6.00E−97 | 69% |
| 37 | G558 | AT5G06950 | SGN-UNIGENE-SINGLET-340722 | 611 | Lycopersicon esculentum | 6.00E−26 | 55% |
| 37 | G558 | AT5G06950 | SGN-UNIGENE-SINGLET-43282 | 612 | Lycopersicon esculentum | 2.00E−63 | 60% |
| 37 | G558 | AT5G06950 | Mtr_S15185262 | 481 | Medicago truncatula | 2.00E−23 | 92% |
| 37 | G558 | AT5G06950 | Mtr_S5309116 | 482 | Medicago truncatula | 2.00E−84 | 70% |
| 37 | G558 | AT5G06950 | Mtr_S7091737 | 483 | Medicago truncatula | 9.00E−29 | 88% |
| 37 | G558 | AT5G06950 | Os_S83289 | 418 | Oryza sativa | 1.00E−144 | 78% |
| 37 | G558 | AT5G06950 | Os_S83290 | 419 | Oryza sativa | 1.00E−139 | 79% |
| 37 | G558 | AT5G06950 | Os_S83291 | 420 | Oryza sativa | 1.00E−139 | 75% |
| 37 | G558 | AT5G06950 | Os_S83292 | 421 | Oryza sativa | 1.00E−138 | 74% |
| 37 | G558 | AT5G06950 | Pta_S17047774 | 698 | Pinus taeda | 1.00E−56 | 64% |
| 37 | G558 | AT5G06950 | Pta_S17049082 | 699 | Pinus taeda | 5.00E−17 | 87% |
| 37 | G558 | AT5G06950 | Ptp_S17968122 | 730 | Populus tremula x | 6.00E−48 | 91% |
| | | | | | Populus tremuloides | | |
| 37 | G558 | AT5G06950 | Sof_S17339937 | 774 | Saccharum officinarum | 4.00E−74 | 32% |
| 37 | G558 | AT5G06950 | Sof_S17379632 | 775 | Saccharum officinarum | 3.00E−84 | 77% |
| 37 | G558 | AT5G06950 | Sof_S17473960 | 776 | Saccharum officinarum | 5.00E−92 | 80% |
| 37 | G558 | AT5G06950 | Stu_S14742290 | 793 | Solanum tuberosum | 1.00E−125 | 62% |
| 37 | G558 | AT5G06950 | Stu_S14742333 | 794 | Solanum tuberosum | 1.00E−120 | 59% |
| 37 | G558 | AT5G06950 | Stu_S18108323 | 795 | Solanum tuberosum | 1.00E−17 | 68% |
| 37 | G558 | AT5G06950 | Stu_S18130411 | 796 | Solanum tuberosum | 1.00E−127 | 73% |
| 37 | G558 | AT5G06950 | Stu_S18130846 | 797 | Solanum tuberosum | 7.00E−88 | 54% |
| 37 | G558 | AT5G06950 | Stu_S18131293 | 798 | Solanum tuberosum | 6.00E−39 | 64% |
| 37 | G558 | AT5G06950 | Sbi_S15655270 | 765 | Sorghum bicolor | 6.00E−22 | 77% |
| 37 | G558 | AT5G06950 | Sbi_S17497937 | 766 | Sorghum bicolor | 6.00E−30 | 67% |
| 37 | G558 | AT5G06950 | Sbi_S19492714 | 767 | Sorghum bicolor | 4.00E−27 | 67% |
| 37 | G558 | AT5G06950 | Sbi_S19493653 | 768 | Sorghum bicolor | 4.00E−39 | 65% |
| 37 | G558 | AT5G06950 | Ta_S115084 | 557 | Triticum aestivum | 1.00E−19 | 77% |
| 37 | G558 | AT5G06950 | Ta_S141705 | 558 | Triticum aestivum | 5.00E−10 | 90% |
| 37 | G558 | AT5G06950 | Ta_S66308 | 559 | Triticum aestivum | 1.00E−136 | 75% |
| 37 | G558 | AT5G06950 | Ta_S66461 | 560 | Triticum aestivum | 1.00E−142 | 77% |
| 37 | G558 | AT5G06950 | Vvi_S15429865 | 675 | Vitis vinifera | 2.00E−76 | 53% |
| 37 | G558 | AT5G06950 | Vvi_S16526894 | 676 | Vitis vinifera | 1.00E−80 | 81% |
| 37 | G558 | AT5G06950 | Zm_S11418176 | 515 | Zea mays | 1.00E−141 | 77% |
| 37 | G558 | AT5G06950 | Zm_S11418177 | 516 | Zea mays | 1.00E−138 | 76% |
| 37 | G558 | AT5G06950 | Zm_S11425511 | 517 | Zea mays | 5.00E−58 | 59% |
| 37 | G558 | AT5G06950 | Zm_S11432162 | 518 | Zea mays | 4.00E−29 | 67% |
| 39 | G567 | AT4G02640 | Os_S60616 | 422 | Oryza sativa | 3.00E−47 | 34% |
| 39 | G567 | AT4G02640 | Os_S64145 | 423 | Oryza sativa | 1.00E−37 | 33% |
| 39 | G567 | AT4G02640 | Stu_S18120365 | 799 | Solanum tuberosum | 9.00E−45 | 37% |
| 39 | G567 | AT4G02640 | Zm_S11417946 | 519 | Zea mays | 1.00E−46 | 34% |
| 39 | G567 | AT4G02640 | Zm_S11417974 | 520 | Zea mays | 2.00E−44 | 34% |
| 39 | G567 | AT4G02640 | Zm_S11418174 | 521 | Zea mays | 1.00E−31 | 30% |
| 41 | G580 | AT2G17770 | SGN-UNIGENE-SINGLET-392194 | 613 | Lycopersicon esculentum | 1.00E−09 | 33% |
| 43 | G635 | AT5G63420 | Lsa_S18814922 | 716 | Lactuca sativa | 1.00E−110 | 78% |
| 43 | G635 | AT5G63420 | Lco_S19346901 | 753 | Lotus corniculatus | 2.00E−20 | 65% |
| 43 | G635 | AT5G63420 | Mtr_S5399163 | 484 | Medicago truncatula | 8.00E−47 | 62% |
| 43 | G635 | AT5G63420 | Sof_S17305305 | 777 | Saccharum officinarum | 7.00E−98 | 79% |
| 43 | G635 | AT5G63420 | Zm_S11522393 | 522 | Zea mays | 2.00E−78 | 76% |
| 45 | G675 | AT1G34670 | Zm_S11529197 | 523 | Zea mays | 2.00E−18 | 93% |
| 47 | G729 | AT5G16560 | Gma_S4928741 | 460 | Glycine max | 3.00E−04 | 35% |
| 47 | G729 | AT5G16560 | Gma_S5129577 | 461 | Glycine max | 4.00E−04 | 27% |
| 47 | G729 | AT5G16560 | Lsa_S18816514 | 717 | Lactuca sativa | 4.00E−45 | 37% |
| 47 | G729 | AT5G16560 | Lco_S19334151 | 754 | Lotus corniculatus | 3.00E−05 | 36% |
| 47 | G729 | AT5G16560 | SGN-UNIGENE-54539 | 615 | Lycopersicon esculentum | 2.00E−21 | 38% |
| 47 | G729 | AT5G16560 | SGN-UNIGENE-SINGLET-39727 | 618 | Lycopersicon esculentum | 5.00E−33 | 61% |
| 47 | G729 | AT5G16560 | SGN-UNIGENE-SINGLET-40526 | 619 | Lycopersicon esculentum | 3.00E−19 | 38% |
| 47 | G729 | AT5G16560 | Zm_S11478301 | 525 | Zea mays | 4.00E−27 | 50% |
| 49 | G812 | AT3G51910 | SGN-UNIGENE-45592 | 620 | Lycopersicon esculentum | 7.00E−57 | 36% |
| 51 | G843 | AT3G07740 | Lsa_S18826577 | 718 | Lactuca sativa | 4.00E−70 | 62% |
| 51 | G843 | AT3G07740 | Os_S51420 | 425 | Oryza sativa | 2.00E−23 | 54% |
| 51 | G843 | AT3G07740 | Ppa_S17599742 | 815 | Physcomitrel la patens | 7.00E−15 | 33% |
| 51 | G843 | AT3G07740 | Sbi_S14712583 | 769 | Sorghum bicolor | 2.00E−25 | 43% |
| 53 | G881 | AT4G31800 | Gma_S4999008 | 462 | Glycine max | 3.00E−27 | 56% |
| 53 | G881 | AT4G31800 | SGN-UNIGENE-45119 | 621 | Lycopersicon esculentum | 3.00E−16 | 92% |
| 53 | G881 | AT4G31800 | SGN-UNIGENE-SINGLET-440841 | 623 | Lycopersicon esculentum | 9.00E−39 | 56% |
| 53 | G881 | AT4G31800 | Sof_S17309586 | 778 | Saccharum officinarum | 2.00E−04 | 56% |
| 53 | G881 | AT4G31800 | Ta_S141953 | 562 | Triticum aestivum | 3.00E−04 | 54% |
| 55 | G937 | AT1G49560 | Gma_S5129137 | 463 | Glycine max | 4.00E−20 | 54% |
| 55 | G937 | AT1G49560 | Lco_S19398752 | 755 | Lotus corniculatus | 0.35 | 52% |
| 55 | G937 | AT1G49560 | Vvi_S15431951 | 678 | Vitis vinifera | 2.00E−39 | 60% |
| 55 | G937 | AT1G49560 | Vvi_S16805106 | 679 | Vitis vinifera | 1.00E−16 | 50% |
| 55 | G937 | AT1G49560 | Zm_S11434591 | 526 | Zea mays | 1.00E−04 | 34% |
| 59 | G1007 | AT2G25820 | Pta_S16846031 | 700 | Pinus taeda | 5.00E−30 | 37% |
| 61 | G1053 | AT2G04038 | Ta_S121486 | 563 | Triticum aestivum | 4.00E−10 | 43% |
| 63 | G1078 | AT3G60320 | SGN-UNIGENE-54082 | 625 | Lycopersicon esculentum | 5.00E−70 | 64% |
| 63 | G1078 | AT3G60320 | SGN-UNIGENE-57266 | 626 | Lycopersicon esculentum | 2.00E−86 | 74% |
| 63 | G1078 | AT3G60320 | SGN-UNIGENE-SINGLET-395949 | 627 | Lycopersicon esculentum | 1.00E−30 | 87% |
| 63 | G1078 | AT3G60320 | Os_S66076 | 426 | Oryza sativa | 1.00E−999 | 47% |
| 63 | G1078 | AT3G60320 | Sbi_S15901323 | 770 | Sorghum bicolor | 1.00E−24 | 37% |
| 63 | G1078 | AT3G60320 | Vvi_S16868087 | 680 | Vitis vinifera | 3.00E−35 | 75% |
| 65 | G1226 | AT4G01460 | Zm_S11426582 | 527 | Zea mays | 0.047 | 51% |
| 67 | G1273 | AT2G37260 | Zm_S11425989 | 528 | Zea mays | 7.00E−23 | 67% |
| 69 | G1324 | AT1G68320 | Gma_S5011023 | 465 | Glycine max | 6.00E−18 | 63% |
| 69 | G1324 | AT1G68320 | Lsa_S18828897 | 719 | Lactuca sativa | 2.00E−65 | 64% |
| 69 | G1324 | AT1G68320 | Stu_S19063684 | 800 | Solanum tuberosum | 2.00E−11 | 42% |
| 69 | G1324 | AT1G68320 | Zm_S11529166 | 530 | Zea mays | 1.00E−18 | 86% |
| 69 | G1324 | AT1G68320 | Zm_S11529168 | 531 | Zea mays | 8.00E−16 | 76% |
| 71 | G1328 | AT4G05100 | SGN-UNIGENE-SINGLET-39199 | 630 | Lycopersicon esculentum | 3.00E−74 | 81% |
| 71 | G1328 | AT4G05100 | Stu_S19116842 | 801 | Solanum tuberosum | 4.00E−10 | 34% |
| 71 | G1328 | AT4G05100 | Zm_S11529155 | 533 | Zea mays | 1.00E−18 | 95% |
| 73 | G1444 | AT2G42040 | Gma_S4929057 | 467 | Glycine max | 1.00E−21 | 46% |
| 73 | G1444 | AT2G42040 | Ppa_S17595796 | 816 | Physcomitrel la patens | 5.00E−04 | 53% |
| 73 | G1444 | AT2G42040 | Ppa_S17602854 | 817 | Physcoimtrel la patens | 3.00E−05 | 29% |
| 79 | G1481 | AT4G27310 | Gma_S5036787 | 468 | Glycine max | 3.00E−25 | 37% |
| 79 | G1481 | AT4G27310 | Lsa_S18813209 | 720 | Lactuca sativa | 1.00E−37 | 46% |
| 79 | G1481 | AT4G27310 | SGN-UNIGENE-49975 | 632 | Lycopersicon esculentum | 5.00E−29 | 41% |
| 79 | G1481 | AT4G27310 | SGN-UNIGENE-52163 | 633 | Lycopersicon esculentum | 4.00E−38 | 46% |
| 79 | G1481 | AT4G27310 | SGN-UNIGENE-54438 | 635 | Lycopersicon esculentum | 1.00E−29 | 38% |
| 79 | G1481 | AT4G27310 | SGN-UNIGENE-57631 | 636 | Lycopersicon esculentum | 5.00E−42 | 45% |
| 79 | G1481 | AT4G27310 | Stu_S18131013 | 802 | Solanum tuberosum | 7.00E−41 | 44% |
| 79 | G1481 | AT4G27310 | Vvi_S15383518 | 681 | Vitis vinifera | 4.00E−34 | 40% |
| 79 | G1481 | AT4G27310 | Vvi_S16870346 | 682 | Vitis vinifera | 4.00E−46 | 47% |
| 83 | G1543 | AT2G01430 | Os_S65512 | 428 | Oryza sativa | 1.00E−47 | 67% |
| 85 | G1635 | AT5G17300 | Gma_S4973270 | 470 | Glycine max | 4.00E−09 | 34% |
| 85 | G1635 | AT5G17300 | Gma_S5050105 | 471 | Glycine max | 2.00E−05 | 43% |
| 85 | G1635 | AT5G17300 | Vvi_S16870895 | 685 | Vitis vinifera | 1.00E−07 | 43% |
| 87 | G1638 | AT2G38090 | Lsa_S18802835 | 721 | Lactuca sativa | 4.00E−56 | 48% |
| 87 | G1638 | AT2G38090 | SGN-UNIGENE-53190 | 637 | Lycopersicon esculentum | 2.00E−76 | 64% |
| 87 | G1638 | AT2G38090 | SGN-UNIGENE-SINGLET-441055 | 638 | Lycopersicon esculentum | 4.00E−47 | 64% |
| 87 | G1638 | AT2G38090 | Os_S31018 | 430 | Oryza sativa | 4.00E−31 | 48% |
| 87 | G1638 | AT2G38090 | Sbi_S19499592 | 771 | Sorghum bicolor | 8.00E−19 | 43% |
| 87 | G1638 | AT2G38090 | Zm_S11324534 | 534 | Zea mays | 4.00E−35 | 80% |
| 89 | G1640 | AT5G49330 | Lsa_S18786927 | 722 | Lactuca sativa | 3.00E−52 | 58% |
| 89 | G1640 | AT5G49330 | SGN-UNIGENE-SINGLET-46216 | 639 | Lycopersicon esculentum | 3.00E−34 | 61% |
| 89 | G1640 | AT5G49330 | Zm_S11529203 | 535 | Zea mays | 7.00E−15 | 74% |
| 91 | G1645 | AT1G26780 | SGN-UNIGENE-SINGLET-14240 | 640 | Lycopersicon esculentum | 4.00E−61 | 92% |
| 97 | G1752 | AT2G31230 | Hv_S20601 | 498 | Hordeum vulgare | 9.00E−15 | 35% |
| 99 | G1755 | AT2G40350 | SGN-UNIGENE-57946 | 641 | Lycopersicon esculentum | 2.00E−07 | 28% |
| 107 | G1808 | AT4G37730 | Gma_S5132128 | 472 | Glycine max | 2.00E−11 | 34% |
| 107 | G1808 | AT4G37730 | SGN-UNIGENE-50805 | 642 | Lycopersicon esculentum | 3.00E−29 | 40% |
| 117 | G1895 | AT1G26790 | Pta_S15747863 | 701 | Pinus taeda | 6.00E−08 | 49% |
| 119 | G1897 | AT5G66940 | Sof_S17450399 | 779 | Saccharum officinarum | 5.00E−25 | 78% |
| 121 | G1903 | AT1G69570 | Pta_S15747863 | 701 | Pinus taeda | 6.00E−08 | 49% |
| 123 | G1909 | AT1G07640 | SGN-UNIGENE-54382 | 644 | Lycopersicon esculentum | 1.00E−30 | 53% |
| 123 | G1909 | AT1G07640 | Zm_S11443238 | 537 | Zea mays | 2.00E−05 | 39% |
| 125 | G1935 | AT1G77950 | SGN-UNIGENE-49757 | 645 | Lycopersicon esculentum | 3.00E−18 | 30% |
| 125 | G1935 | AT1G77950 | SGN-UNIGENE-52060 | 646 | Lycopersicon esculentum | 9.00E−13 | 41% |
| 125 | G1935 | AT1G77950 | SGN-UNIGENE-SINGLET-16934 | 647 | Lycopersicon esculentum | 2.00E−24 | 52% |
| 125 | G1935 | AT1G77950 | Ppa_S17639839 | 820 | Physcomitrel la patens | 9.00E−31 | 41% |
| 125 | G1935 | AT1G77950 | Ppa_S17639840 | 821 | Physcomitrel la patens | 8.00E−32 | 40% |
| 125 | G1935 | AT1G77950 | Ppa_S17639871 | 822 | Physcomitrel la patens | 8.00E−32 | 39% |
| 125 | G1935 | AT1G77950 | Ppa_S17639872 | 823 | Physcomitrel la patens | 6.00E−32 | 39% |
| 127 | G1950 | AT2G03430 | Lsa_S18777138 | 723 | Lactuca sativa | 6.00E−80 | 64% |
| 127 | G1950 | AT2G03430 | Lsa_S18831768 | 724 | Lactuca sativa | 7.00E−13 | 30% |
| 127 | G1950 | AT2G03430 | Lco_S19316645 | 758 | Lotus corniculatus | 7.00E−24 | 76% |
| 127 | G1950 | AT2G03430 | SGN-UNIGENE-SINGLET-475671 | 648 | Lycopersicon esculentum | 3.00E−46 | 67% |
| 127 | G1950 | AT2G03430 | SGN-UNIGENE-SINGLET-56300 | 649 | Lycopersicon esculentum | 2.00E−17 | 36% |
| 127 | G1950 | AT2G03430 | Mtr_S5402942 | 487 | Medicago truncatula | 7.00E−11 | 84% |
| 127 | G1950 | AT2G03430 | Ppa_S17636323 | 824 | Physcomitrel la patens | 5.00E−13 | 35% |
| 127 | G1950 | AT2G03430 | Ta_S60643 | 565 | Triticum aestivum | 2.00E−50 | 68% |
| 127 | G1950 | AT2G03430 | Zm_S11413309 | 538 | Zea mays | 6.00E−35 | 72% |
| 129 | G1954 | AT3G24140 | SGN-UNIGENE-SINGLET-53753 | 650 | Lycopersicon esculentum | 3.00E−18 | 51% |
| 129 | G1954 | AT3G24140 | Pta_S16799286 | 702 | Pinus taeda | 1.00E−13 | 58% |
| 131 | G1958 | AT4G28610 | Gma_S5063433 | 473 | Glycine max | 3.00E−27 | 52% |
| 131 | G1958 | AT4G28610 | Gma_S5140349 | 474 | Glycine max | 1.00E−13 | 44% |
| 131 | G1958 | AT4G28610 | Hv_S114723 | 499 | Hordeum vulgare | 2.00E−11 | 51% |
| 131 | G1958 | AT4G28610 | SGN-UNIGENE-57277 | 651 | Lycopersicon esculentum | 0.018 | 34% |
| 131 | G1958 | AT4G28610 | SGN-UNIGENE-SINGLET-3690 | 652 | Lycopersicon esculentum | 1.00E−58 | 77% |
| 131 | G1958 | AT4G28610 | SGN-UNIGENE-SINGLET-38343 | 653 | Lycopersicon esculentum | 3.00E−48 | 43% |
| 131 | G1958 | AT4G28610 | SGN-UNIGENE-SINGLET-390838 | 654 | Lycopersicon esculentum | 2.00E−12 | 45% |
| 131 | G1958 | AT4G28610 | SGN-UNIGENE-SINGLET-57100 | 655 | Lycopersicon esculentum | 1.00E−10 | 32% |
| 131 | G1958 | AT4G28610 | Ptp_S17904851 | 736 | Populus tremula x | 3.00E−12 | 84% |
| | | | | | Populus tremuloides | | |
| 131 | G1958 | AT4G28610 | Sof_S17303253 | 780 | Saccharum officinarum | 2.00E−55 | 60% |
| 131 | G1958 | AT4G28610 | Stu_S18126579 | 803 | Solanum tuberosum | 1.00E−56 | 63% |
| 131 | G1958 | AT4G28610 | Stu_S18135521 | 804 | Solanum tuberosum | 9.00E−58 | 54% |
| 131 | G1958 | AT4G28610 | Ta_S173982 | 566 | Triticum aestivum | 3.00E−25 | 37% |
| 131 | G1958 | AT4G28610 | Ta_S204555 | 567 | Triticum aestivum | 4.00E−59 | 48% |
| 131 | G1958 | AT4G28610 | Zm_S11333932 | 539 | Zea mays | 9.00E−32 | 57% |
| 133 | G2052 | AT5G46590 | SGN-UNIGENE-52489 | 656 | Lycopersicon esculentum | 9.00E−47 | 87% |
| 133 | G2052 | AT5G46590 | SGN-UNIGENE-53237 | 657 | Lycopersicon esculentum | 7.00E−58 | 73% |
| 133 | G2052 | AT5G46590 | Vvi_S15351555 | 688 | Vitis vinifera | 2.00E−10 | 34% |
| 139 | G2116 | AT1G06850 | Lco_S19325184 | 759 | Lotus corniculatus | 4.00E−05 | 29% |
| 139 | G2116 | AT1G06850 | SGN-UNIGENE-SINGLET-8462 | 658 | Lycopersicon esculentum | 3.00E−06 | 37% |
| 139 | G2116 | AT1G06850 | Zm_S11505224 | 540 | Zea mays | 5.00E−22 | 42% |
| 141 | G2132 | AT1G49120 | SGN-UNIGENE-SINGLET-451192 | 659 | Lycopersicon esculentum | 5.00E−04 | 54% |
| 145 | G2141 | AT1G68920 | SGN-UNIGENE-58219 | 660 | Lycopersicon esculentum | 3.00E−16 | 37% |
| 145 | G2141 | AT1G68920 | Ta_S112420 | 569 | Triticum aestivum | 2.00E−16 | 71% |
| 147 | G2145 | AT1G27740 | Ta_S174040 | 570 | Triticum aestivum | 3.00E−40 | 64% |
| 149 | G2150 | AT3G23690 | Sbi_S19509323 | 772 | Sorghum bicolor | 3.00E−14 | 45% |
| 149 | G2150 | AT3G23690 | Ta_S118840 | 571 | Triticum aestivum | 3.00E−38 | 58% |
| 151 | G2157 | AT3G55560 | Gma_S4925445 | 475 | Glycine max | 2.00E−31 | 52% |
| 151 | G2157 | AT3G55560 | Han_S18724409 | 707 | Helianthus annuus | 2.00E−08 | 30% |
| 151 | G2157 | AT3G55560 | Stu_S18117799 | 805 | Solanum tuberosum | 2.00E−70 | 50% |
| 153 | G2294 | AT1G44830 | Lco_S19357424 | 760 | Lotus corniculatus | 0.11 | 35% |
| 153 | G2294 | AT1G44830 | Stu_S18109605 | 806 | Solanum tuberosum | 2.00E−04 | 38% |
| 153 | G2294 | AT1G44830 | Vvi_S15353048 | 689 | Vitis vinifera | 5.00E−07 | 36% |

[0228] Table 6 identifies the homologous relationships of sequences found in the Sequence Listing for which such a relationship has been identified. The column headings list: (a) the SEQ ID NO of each polynucleotide and polypeptide sequence; (b) the sequence identifier (i.e., the GID or UniGene identifier); (c) the biochemical nature of the sequence (i.e., polynucleotide (DNA) or protein (PRT)); (d) the species in which the given sequence in the first column is found; and (e) the paralogous or orthologous relationship to other sequences in the Sequence Listing.

TABLE 6
Homologous relationships found within the Sequence Listing

| SEQ | | DNA | | |
|---|---|---|---|---|
| ID | | or | | |
| NO: | GID | PRT | Species | Relationship |
| 1 | G3 | DNA | Arabidopsis | Predicted polypeptide sequence is |
| | | | thaliana | paralogous to G10 |
| 2 | G3 | PRT | Arabidopsis | Paralogous to G10 |
| | | | thaliana | |
| 3 | G22 | DNA | Arabidopsis | Predicted polypeptide sequence is |
| | | | thaliana | paralogous to G1006, G28; ortho- |
| | | | | logous to G3430, G3659, G3660, |
| | | | | G3661, G3717, G3718, G3841, |
| | | | | G3843, G3844, G3845, G3846, |
| | | | | G3848, G3852, G3856, G3857, |
| | | | | G3858, G3864, G3865 |
| 4 | G22 | PRT | Arabidopsis | Paralogous to G1006, G28; Ortho- |
| | | | thaliana | logous to G3430, G3659, G3660, |
| | | | | G3661, G3717, G3718, G3841, |
| | | | | G3843, G3844, G3845, G3846, |
| | | | | G3848, G3852, G3856, G3857, |
| | | | | G3858, G3864, G3865 |
| 5 | G24 | DNA | Arabidopsis | Predicted polypeptide sequence is |
| | | | thaliana | paralogous to G12, G1277, G1379; |
| | | | | orthologous to G3656 |
| 6 | G24 | PRT | Arabidopsis | Paralogous to G12, G1277, G1379; |
| | | | thaliana | Orthologous to G3656 |
| 7 | G47 | DNA | Arabidopsis | Predicted polypeptide sequence is |
| | | | thaliana | paralogous to G2133; orthologous to |
| | | | | G3643, G3644, G3645, G3646, |
| | | | | G3647, G3649, G3650, G3651 |
| 8 | G47 | PRT | Arabidopsis | Paralogous to G2133; Orthologous to |
| | | | thaliana | G3643, G3644, G3645, G3646, |
| | | | | G3647, G3649, G3650, G3651 |
| 9 | G156 | DNA | Arabidopsis | |
| | | | thaliana | |
| 10 | G156 | PRT | Arabidopsis | |
| | | | thaliana | |
| 11 | G159 | DNA | Arabidopsis | Predicted polypeptide sequence is |
| | | | thaliana | paralogous to G165 |
| 12 | G159 | PRT | Arabidopsis | Paralogous to G165 |
| | | | thaliana | |
| 13 | G187 | DNA | Arabidopsis | Predicted polypeptide sequence is |
| | | | thaliana | paralogous to G195 |
| 14 | G187 | PRT | Arabidopsis | Paralogous to G195 |
| | | | thaliana | |
| 15 | G190 | DNA | Arabidopsis | |
| | | | thaliana | |
| 16 | G190 | PRT | Arabidopsis | |
| | | | thaliana | |
| 17 | G226 | DNA | Arabidopsis | Predicted polypeptide sequence is |
| | | | thaliana | paralogous to G1816, G225, G2718, |
| | | | | G682, G3930; orthologous to G3392, |
| | | | | G3393, G3431, G3444, G3445, |
| | | | | G3446, G3447, G3448, G3449, |
| | | | | G3450 |
| 18 | G226 | PRT | Arabidopsis | Paralogous to G1816, G225, G2718, |
| | | | thaliana | G682, G3930; Orthologous to G3392, |
| | | | | G3393, G3431, G3444, G3445, |
| | | | | G3446, G3447, G3448, G3449, |
| | | | | G3450 |
| 19 | G237 | DNA | Arabidopsis | Predicted polypeptide sequence is |
| | | | thaliana | paralogous to G1309 |
| 20 | G237 | PRT | Arabidopsis | Paralogous to G1309 |
| | | | thaliana | |
| 21 | G270 | DNA | Arabidopsis | |
| | | | thaliana | |
| 22 | G270 | PRT | Arabidopsis | |
| | | | thaliana | |
| 23 | G328 | DNA | Arabidopsis | Predicted polypeptide sequence is |
| | | | thaliana | paralogous to G2436, G2443 |
| 24 | G328 | PRT | Arabidopsis | Paralogous to G2436, G2443 |
| | | | thaliana | |
| 25 | G363 | DNA | Arabidopsis | |
| | | | thaliana | |
| 26 | G363 | PRT | Arabidopsis | |
| | | | thaliana | |
| 27 | G383 | DNA | Arabidopsis | Predicted polypeptide sequence is |
| | | | thaliana | paralogous to G1917 |
| 28 | G383 | PRT | Arabidopsis | Paralogous to G1917 |
| | | | thaliana | |
| 29 | G435 | DNA | Arabidopsis | |
| | | | thaliana | |
| 30 | G435 | PRT | Arabidopsis | |
| | | | thaliana | |
| 31 | G450 | DNA | Arabidopsis | Predicted polypeptide sequence is |
| | | | thaliana | paralogous to G448, G455, G456 |
| 32 | G450 | PRT | Arabidopsis | Paralogous to G448, G455, G456 |
| | | | thaliana | |
| 33 | G522 | DNA | Arabidopsis | Predicted polypeptide sequence is |
| | | | thaliana | paralogous to G1354, G1355, G1453, |
| | | | | G1766, G2534, G761 |
| 34 | G522 | PRT | Arabidopsis | Paralogous to G1354, G1355, G1453, |
| | | | thaliana | G1766, G2534, G761 |
| 35 | G551 | DNA | Arabidopsis | |
| | | | thaliana | |
| 36 | G551 | PRT | Arabidopsis | |
| | | | thaliana | |
| 37 | G558 | DNA | Arabidopsis | Predicted polypeptide sequence is |
| | | | thaliana | paralogous to G1198, G1806, G554, |
| | | | | G555, G556, G578, G629 |
| 38 | G558 | PRT | Arabidopsis | Paralogous to G1198, G1806, G554, |
| | | | thaliana | G555, G556, G578, G629 |
| 39 | G567 | DNA | Arabidopsis | |
| | | | thaliana | |
| 40 | G567 | PRT | Arabidopsis | |
| | | | thaliana | |
| 41 | G580 | DNA | Arabidopsis | Predicted polypeptide sequence is |
| | | | thaliana | paralogous to G568 |
| 42 | G580 | PRT | Arabidopsis | Paralogous to G568 |
| | | | thaliana | |
| 43 | G635 | DNA | Arabidopsis | |
| | | | thaliana | |
| 44 | G635 | PRT | Arabidopsis | |
| | | | thaliana | |
| 45 | G675 | DNA | Arabidopsis | |
| | | | thaliana | |
| 46 | G675 | PRT | Arabidopsis | |
| | | | thaliana | |
| 47 | G729 | DNA | Arabidopsis | Predicted polypeptide sequence is |
| | | | thaliana | paralogous to G1040, G3034, G730 |
| 48 | G729 | PRT | Arabidopsis | Paralogous to G1040, G3034, G730 |
| | | | thaliana | |
| 49 | G812 | DNA | Arabidopsis | Predicted polypeptide sequence is |
| | | | thaliana | paralogous to G2467 |
| 50 | G812 | PRT | Arabidopsis | Paralogous to G2467 |
| | | | thaliana | |
| 51 | G843 | DNA | Arabidopsis | |
| | | | thaliana | |
| 52 | G843 | PRT | Arabidopsis | |
| | | | thaliana | |
| 53 | G881 | DNA | Arabidopsis | Predicted polypeptide sequence is |
| | | | thaliana | paralogous to G986 |
| 54 | G881 | PRT | Arabidopsis | Paralogous to G986 |
| | | | thaliana | |
| 55 | G937 | DNA | Arabidopsis | |
| | | | thaliana | |
| 56 | G937 | PRT | Arabidopsis | |
| | | | thaliana | |
| 57 | G989 | DNA | Arabidopsis | |
| | | | thaliana | |
| 58 | G989 | PRT | Arabidopsis | |
| | | | thaliana | |
| 59 | G1007 | DNA | Arabidopsis | Predicted polypeptide sequence is |
| | | | thaliana | paralogous to G1846 |
| 60 | G1007 | PRT | Arabidopsis | Paralogous to G1846 |
| | | | thaliana | |
| 61 | G1053 | DNA | Arabidopsis | Predicted polypeptide sequence is |
| | | | thaliana | paralogous to G2629 |
| 62 | G1053 | PRT | Arabidopsis | Paralogous to G2629 |
| | | | thaliana | |
| 63 | G1078 | DNA | Arabidopsis | Predicted polypeptide sequence is |
| | | | thaliana | paralogous to G577 |
| 64 | G1078 | PRT | Arabidopsis | Paralogous to G577 |
| | | | thaliana | |
| 65 | G1226 | DNA | Arabidopsis | |
| | | | thaliana | |
| 66 | G1226 | PRT | Arabidopsis | |
| | | | thaliana | |
| 67 | G1273 | DNA | Arabidopsis | |
| | | | thaliana | |
| 68 | G1273 | PRT | Arabidopsis | |
| | | | thaliana | |
| 69 | G1324 | DNA | Arabidopsis | Predicted polypeptide sequence is |
| | | | thaliana | paralogous to G2893 |
| 70 | G1324 | PRT | Arabidopsis | Paralogous to G2893 |
| | | | thaliana | |
| 71 | G1328 | DNA | Arabidopsis | Predicted polypeptide sequence is |
| | | | thaliana | paralogous to G198 |
| 72 | G1328 | PRT | Arabidopsis | Paralogous to G198 |
| | | | thaliana | |
| 73 | G1444 | DNA | Arabidopsis | |
| | | | thaliana | |
| 74 | G1444 | PRT | Arabidopsis | |
| | | | thaliana | |
| 75 | G1462 | DNA | Arabidopsis | Predicted polypeptide sequence is |
| | | | thaliana | paralogous to G1461, G1463, G1464, |
| | | | | G1465 |
| 76 | G1462 | PRT | Arabidopsis | Paralogous to G1461, G1463, G1464, |
| | | | thaliana | G1465 |
| 77 | G1463 | DNA | Arabidopsis | Predicted polypeptide sequence is |
| | | | thaliana | paralogous to G1461, G1462, G1464, |
| | | | | G1465 |
| 78 | G1463 | PRT | Arabidopsis | Paralogous to G1461, G1462, G1464, |
| | | | thaliana | G1465 |
| 79 | G1481 | DNA | Arabidopsis | Predicted polypeptide sequence is |
| | | | thaliana | paralogous to G900, orthologous to |
| | | | | G4014, G4015, G4016 |
| 80 | G1481 | PRT | Arabidopsis | Paralogous to G900; orthologous to |
| | | | thaliana | G4014, G4015, G4016 |
| 81 | G1504 | DNA | Arabidopsis | Predicted polypeptide sequence is |
| | | | thaliana | paralogous to G2442, G2504 |
| 82 | G1504 | PRT | Arabidopsis | Paralogous to G2442, G2504 |
| | | | thaliana | |
| 83 | G1543 | DNA | Arabidopsis | Predicted polypeptide sequence is |
| | | | thaliana | orthologous to G3490, G3510, G3524 |
| 84 | G1543 | PRT | Arabidopsis | Orthologous to G3490, G3510, |
| | | | thaliana | G3524 |
| 85 | G1635 | DNA | Arabidopsis | |
| | | | thaliana | |
| 86 | G1635 | PRT | Arabidopsis | |
| | | | thaliana | |
| 87 | G1638 | DNA | Arabidopsis | |
| | | | thaliana | |
| 88 | G1638 | PRT | Arabidopsis | |
| | | | thaliana | |
| 89 | G1640 | DNA | Arabidopsis | |
| | | | thaliana | |
| 90 | G1640 | PRT | Arabidopsis | |
| | | | thaliana | |
| 91 | G1645 | DNA | Arabidopsis | Predicted polypeptide sequence is |
| | | | thaliana | paralogous to G2424 |
| 92 | G1645 | PRT | Arabidopsis | Paralogous to G2424 |
| | | | thaliana | |
| 93 | G1650 | DNA | Arabidopsis | |
| | | | thaliana | |
| 94 | G1650 | PRT | Arabidopsis | |
| | | | thaliana | |
| 95 | G1659 | DNA | Arabidopsis | |
| | | | thaliana | |
| 96 | G1659 | PRT | Arabidopsis | |
| | | | thaliana | |
| 97 | G1752 | DNA | Arabidopsis | Predicted polypeptide sequence is |
| | | | thaliana | paralogous to G2512 |
| 98 | G1752 | PRT | Arabidopsis | Paralogous to G2512 |
| | | | thaliana | |
| 99 | G1755 | DNA | Arabidopsis | Predicted polypeptide sequence is |
| | | | thaliana | paralogous to G1754 |
| 100 | G1755 | PRT | Arabidopsis | Paralogous to G1754 |
| | | | thaliana | |
| 101 | G1784 | DNA | Arabidopsis | |
| | | | thaliana | |
| 102 | G1784 | PRT | Arabidopsis | |
| | | | thaliana | |
| 103 | G1785 | DNA | Arabidopsis | Predicted polypeptide sequence is |
| | | | thaliana | paralogous to G248 |
| 104 | G1785 | PRT | Arabidopsis | Paralogous to G248 |
| | | | thaliana | |
| 105 | G1791 | DNA | Arabidopsis | Predicted polypeptide sequence is |
| | | | thaliana | paralogous to G1792, G1795, G30; |
| | | | | orthologous to G3380, G3381, |
| | | | | G3383, G3515, G3516, G3517, |
| | | | | G3518, G3519, G3520, G3735, |
| | | | | G3736, G3737, G3794, G3739 |
| 106 | G1791 | PRT | Arabidopsis | Paralogous to G1792, G1795, G30; |
| | | | thaliana | Orthologous to G3380, G3381, |
| | | | | G3383, G3515, G3516, G3517, |
| | | | | G3518, G3519, G3520, G3735, |
| | | | | G3736, G3737, G3794, G3739 |
| 107 | G1808 | DNA | Arabidopsis | Predicted polypeptide sequence is |
| | | | thaliana | paralogous to G1047 |
| 108 | G1808 | PRT | Arabidopsis | Paralogous to G1047 |
| | | | thaliana | |
| 109 | G1809 | DNA | Arabidopsis | |
| | | | thaliana | |
| 110 | G1809 | PRT | Arabidopsis | |
| | | | thaliana | |
| 111 | G1815 | DNA | Arabidopsis | |
| | | | thaliana | |
| 112 | G1815 | PRT | Arabidopsis | |
| | | | thaliana | |
| 113 | G1865 | DNA | Arabidopsis | |
| | | | thaliana | |
| 114 | G1865 | PRT | Arabidopsis | |
| | | | thaliana | |
| 115 | G1884 | DNA | Arabidopsis | |
| | | | thaliana | |
| 116 | G1884 | PRT | Arabidopsis | |
| | | | thaliana | |
| 117 | G1895 | DNA | Arabidopsis | Predicted polypeptide sequence is |
| | | | thaliana | paralogous to G1903 |
| 118 | G1895 | PRT | Arabidopsis | Paralogous to G1903 |
| | | | thaliana | |
| 119 | G1897 | DNA | Arabidopsis | Predicted polypeptide sequence is |
| | | | thaliana | paralogous to G798 |
| 120 | G1897 | PRT | Arabidopsis | Paralogous to G798 |
| | | | thaliana | |
| 121 | G1903 | DNA | Arabidopsis | Predicted polypeptide sequence is |
| | | | thaliana | paralogous to G1895 |
| 122 | G1903 | PRT | Arabidopsis | Paralogous to G1895 |
| | | | thaliana | |
| 123 | G1909 | DNA | Arabidopsis | Predicted polypeptide sequence is |
| | | | thaliana | paralogous to G1264 |
| 124 | G1909 | PRT | Arabidopsis | Paralogous to G1264 |
| | | | thaliana | |
| 125 | G1935 | DNA | Arabidopsis | Predicted polypeptide sequence is |
| | | | thaliana | paralogous to G2058, G2578 |
| 126 | G1935 | PRT | Arabidopsis | Paralogous to G2058, G2578 |
| | | | thaliana | |
| 127 | G1950 | DNA | Arabidopsis | |
| | | | thaliana | |
| 128 | G1950 | PRT | Arabidopsis | |
| | | | thaliana | |
| 129 | G1954 | DNA | Arabidopsis | |
| | | | thaliana | |
| 130 | G1954 | PRT | Arabidopsis | |
| | | | thaliana | |
| 131 | G1958 | DNA | Arabidopsis | |
| | | | thaliana | |
| 132 | G1958 | PRT | Arabidopsis | |
| | | | thaliana | |
| 133 | G2052 | DNA | Arabidopsis | Predicted polypeptide sequence is |
| | | | thaliana | paralogous to G506 |
| 134 | G2052 | PRT | Arabidopsis | Paralogous to G506 |
| | | | thaliana | |
| 135 | G2072 | DNA | Arabidopsis | |
| | | | thaliana | |
| 136 | G2072 | PRT | Arabidopsis | |
| | | | thaliana | |
| 137 | G2108 | DNA | Arabidopsis | |
| | | | thaliana | |
| 138 | G2108 | PRT | Arabidopsis | |
| | | | thaliana | |
| 139 | G2116 | DNA | Arabidopsis | |
| | | | thaliana | |
| 140 | G2116 | PRT | Arabidopsis | |
| | | | thaliana | |
| 141 | G2132 | DNA | Arabidopsis | |
| | | | thaliana | |
| 142 | G2132 | PRT | Arabidopsis | |
| | | | thaliana | |
| 143 | G2137 | DNA | Arabidopsis | |
| | | | thaliana | |
| 144 | G2137 | PRT | Arabidopsis | |
| | | | thaliana | |
| 145 | G2141 | DNA | Arabidopsis | |
| | | | thaliana | |
| 146 | G2141 | PRT | Arabidopsis | |
| | | | thaliana | |
| 147 | G2145 | DNA | Arabidopsis | Predicted polypeptide sequence is |
| | | | thaliana | paralogous to G2148 |
| 148 | G2145 | PRT | Arabidopsis | Paralogous to G2148 |
| | | | thaliana | |
| 149 | G2150 | DNA | Arabidopsis | |
| | | | thaliana | |
| 150 | G2150 | PRT | Arabidopsis | |
| | | | thaliana | |
| 151 | G2157 | DNA | Arabidopsis | |
| | | | thaliana | |
| 152 | G2157 | PRT | Arabidopsis | |
| | | | thaliana | |
| 153 | G2294 | DNA | Arabidopsis | Predicted polypeptide sequence is |
| | | | thaliana | paralogous to G2067, G2115, ortho- |
| | | | | logous to G3657 |
| 154 | G2294 | PRT | Arabidopsis | Paralogous to G2067, G2115; ortho- |
| | | | thaliana | logous to G3657 |
| 155 | G2296 | DNA | Arabidopsis | |
| | | | thaliana | |
| 156 | G2296 | PRT | Arabidopsis | |
| | | | thaliana | |
| 157 | G2313 | DNA | Arabidopsis | |
| | | | thaliana | |
| 158 | G2313 | PRT | Arabidopsis | |
| | | | thaliana | |
| 159 | G2417 | DNA | Arabidopsis | |
| | | | thaliana | |
| 160 | G2417 | PRT | Arabidopsis | |
| | | | thaliana | |
| 161 | G2425 | DNA | Arabidopsis | |
| | | | thaliana | |
| 162 | G2425 | PRT | Arabidopsis | |
| | | | thaliana | |
| 163 | G2505 | DNA | Arabidopsis | Predicted polypeptide sequence is |
| | | | thaliana | paralogous to G2635 |
| 164 | G2505 | PRT | Arabidopsis | Paralogous to G2635 |
| | | | thaliana | |
| 165 | G10 | DNA | Arabidopsis | Predicted polypeptide sequence is |
| | | | thaliana | paralogous to G3. |
| 166 | G10 | PRT | Arabidopsis | Paralogous to G3 |
| | | | thaliana | |
| 167 | G12 | DNA | Arabidopsis | Predicted polypeptide sequence is |
| | | | thaliana | paralogous to G1277, G1379, G24; |
| | | | | orthologous to G3656 |
| 168 | G12 | PRT | Arabidopsis | Paralogous to G1277, G1379, G24; |
| | | | thaliana | Orthologous to G3656 |
| 169 | G28 | DNA | Arabidopsis | Predicted polypeptide sequence is |
| | | | thaliana | paralogous to G22, G1006; ortho- |
| | | | | logous to G3430, G3659, G3660, |
| | | | | G3661, G3717, G3718, G3841, |
| | | | | G3843, G3844, G3845, G3846, |
| | | | | G3848, G3852, G3856, G3857, |
| | | | | G3858, G3864, G3865 |
| 170 | G28 | PRT | Arabidopsis | Paralogous to G22, G1006; Ortho- |
| | | | thaliana | logous to G3430, G3659, G3660, |
| | | | | G3661, G3717, G3718, G3841, |
| | | | | G3843, G3844, G3845, G3846, |
| | | | | G3848, G3852, G3856, G3857, |
| | | | | G3858, G3864, G3865 |
| 171 | G30 | DNA | Arabidopsis | Predicted polypeptide sequence is |
| | | | thaliana | paralogous to G1791, G1792, G1795; |
| | | | | orthologous to G3380, G3381, |
| | | | | G3383, G3515, G3516, G3517, |
| | | | | G3518, G3519, G3520, G3735, |
| | | | | G3736, G3737, G3794, G3739 |
| 172 | G30 | PRT | Arabidopsis | Paralogous to G1791, G1792, G1795; |
| | | | thaliana | Orthologous to G3380, G3381, |
| | | | | G3383, G3515, G3516, G3517, |
| | | | | G3518, G3519, G3520, G3735, |
| | | | | G3736, G3737, G3794, G3739 |
| 173 | G165 | DNA | Arabidopsis | Predicted polypeptide sequence is |
| | | | thaliana | paralogous to G159 |
| 174 | G165 | PRT | Arabidopsis | Paralogous to G159 |
| | | | thaliana | |
| 175 | G195 | DNA | Arabidopsis | Predicted polypeptide sequence is |
| | | | thaliana | paralogous to G187 |
| 176 | G195 | PRT | Arabidopsis | Paralogous to G187 |
| | | | thaliana | |
| 177 | G198 | DNA | Arabidopsis | Predicted polypeptide sequence is |
| | | | thaliana | paralogous to G1328 |
| 178 | G198 | PRT | Arabidopsis | Paralogous to G1328 |
| | | | thaliana | |
| 179 | G225 | DNA | Arabidopsis | Predicted polypeptide sequence is |
| | | | thaliana | paralogous to G1816, G226, G2718, |
| | | | | G682, G3930; orthologous to G3392, |
| | | | | G3393, G3431, G3444, G3445, |
| | | | | G3446, G3447, G3448, G3449, |
| | | | | G3450 |
| 180 | G225 | PRT | Arabidopsis | Paralogous to G1816, G226, G2718, |
| | | | thaliana | G682, G3930; Orthologous to G3392, |
| | | | | G3393, G3431, G3444, G3445, |
| | | | | G3446, G3447, G3448, G3449, |
| | | | | G3450 |
| 181 | G248 | DNA | Arabidopsis | Predicted polypeptide sequence is |
| | | | thaliana | paralogous to G1785 |
| 182 | G248 | PRT | Arabidopsis | Paralogous to G1785 |
| | | | thaliana | |
| 183 | G448 | DNA | Arabidopsis | Predicted polypeptide sequence is |
| | | | thaliana | paralogous to G450, G455, G456 |
| 184 | G448 | PRT | Arabidopsis | Paralogous to G450, G455, G456 |
| | | | thaliana | |
| 185 | G455 | DNA | Arabidopsis | Predicted polypeptide sequence is |
| | | | thaliana | paralogous to G448, G450, G456 |
| 186 | G455 | PRT | Arabidopsis | Paralogous to G448, G450, G456 |
| | | | thaliana | |
| 187 | G456 | DNA | Arabidopsis | Predicted polypeptide sequence is |
| | | | thaliana | paralogous to G448, G450, G455 |
| 188 | G456 | PRT | Arabidopsis | Paralogous to G448, G450, G455 |
| | | | thaliana | |
| 189 | G506 | DNA | Arabidopsis | Predicted polypeptide sequence is |
| | | | thaliana | paralogous to G2052 |
| 190 | G506 | PRT | Arabidopsis | Paralogous to G2052 |
| | | | thaliana | |
| 191 | G554 | DNA | Arabidopsis | Predicted polypeptide sequence is |
| | | | thaliana | paralogous to G1198, G1806, G555, |
| | | | | G556, G558, G578, G629 |
| 192 | G554 | PRT | Arabidopsis | Paralogous to G1198, G1806, G555, |
| | | | thaliana | G556, G558, G578, G629 |
| 193 | G555 | DNA | Arabidopsis | Predicted polypeptide sequence is |
| | | | thaliana | paralogous to G1198, G1806, G554, |
| | | | | G556, G558, G578, G629 |
| 194 | G555 | PRT | Arabidopsis | Paralogous to G1198, G1806, G554, |
| | | | thaliana | G556, G558, G578, G629 |
| 195 | G556 | DNA | Arabidopsis | Predicted polypeptide sequence is |
| | | | thaliana | paralogous to G1198, G1806, G554, |
| | | | | G555, G558, G578, G629 |
| 196 | G556 | PRT | Arabidopsis | Paralogous to G1198, G1806, G554, |
| | | | thaliana | G555, G558, G578, G629 |
| 197 | G568 | DNA | Arabidopsis | Predicted polypeptide sequence is |
| | | | thaliana | paralogous to G580 |
| 198 | G568 | PRT | Arabidopsis | Paralogous to G580 |
| | | | thaliana | |
| 199 | G577 | DNA | Arabidopsis | Predicted polypeptide sequence is |
| | | | thaliana | paralogous to G1078 |
| 200 | G577 | PRT | Arabidopsis | Paralogous to G1078 |
| | | | thaliana | |
| 201 | G578 | DNA | Arabidopsis | Predicted polypeptide sequence is |
| | | | thaliana | paralogous to G1198, G1806, G554, |
| | | | | G555, G556, G558, G629 |
| 202 | G578 | PRT | Arabidopsis | Paralogous to G1198, G1806, G554, |
| | | | thaliana | G555, G556, G558, G629 |
| 203 | G629 | DNA | Arabidopsis | Predicted polypeptide sequence is |
| | | | thaliana | paralogous to G1198, G1806, G554, |
| | | | | G555, G556, G558, G578 |
| 204 | G629 | PRT | Arabidopsis | Paralogous to G1198, G1806, G554, |
| | | | thaliana | G555, G556, G558, G578 |
| 205 | G682 | DNA | Arabidopsis | Predicted polypeptide sequence is |
| | | | thaliana | paralogous to G1816, G225, G226, |
| | | | | G2718, G3930; orthologous to |
| | | | | G3392, G3393, G3431, G3444, |
| | | | | G3445, G3446, G3447, G3448, |
| | | | | G3449, G3450 |
| 206 | G682 | PRT | Arabidopsis | Paralogous to G1816, G225, G226, |
| | | | thaliana | G2718, G3930; Orthologous to |
| | | | | G3392, G3393, G3431, G3444, |
| | | | | G3445, G3446, G3447, G3448, |
| | | | | G3449, G3450 |
| 207 | G730 | DNA | Arabidopsis | Predicted polypeptide sequence is |
| | | | thaliana | paralogous to G1040, G3034, G729 |
| 208 | G730 | PRT | Arabidopsis | Paralogous to G1040, G3034, G729 |
| | | | thaliana | |
| 209 | G761 | DNA | Arabidopsis | Predicted polypeptide sequence is |
| | | | thaliana | paralogous to G1354, G1355, G1453, |
| | | | | G1766, G2534, G522 |
| 210 | G761 | PRT | Arabidopsis | Paralogous to G1354, G1355, G1453, |
| | | | thaliana | G1766, G2534, G522 |
| 211 | G798 | DNA | Arabidopsis | Predicted polypeptide sequence is |
| | | | thaliana | paralogous to G1897 |
| 212 | G798 | PRT | Arabidopsis | Paralogous to G1897 |
| | | | thaliana | |
| 213 | G900 | DNA | Arabidopsis | Predicted polypeptide sequence is |
| | | | thaliana | paralogous to G1481, orthologous to |
| | | | | G4014, G4015, G4016 |
| 214 | G900 | PRT | Arabidopsis | Paralogous to G1481; orthologous to |
| | | | thaliana | G4014, G4015, G4016 |
| 215 | G986 | DNA | Arabidopsis | Predicted polypeptide sequence is |
| | | | thaliana | paralogous to G881 |
| 216 | G986 | PRT | Arabidopsis | Paralogous to G881 |
| | | | thaliana | |
| 217 | G1006 | DNA | Arabidopsis | Predicted polypeptide sequence is |
| | | | thaliana | paralogous to G22, G28; orthologous |
| | | | | to G3430, G3659, G3660, G3661, |
| | | | | G3717, G3718, G3841, G3843, |
| | | | | G3844, G3845, G3846, G3848, |
| | | | | G3852, G3856, G3857, G3858, |
| | | | | G3864, G3865 |
| 218 | G1006 | PRT | Arabidopsis | Paralogous to G22, G28; Orthologous |
| | | | thaliana | to G3430, G3659, G3660, G3661, |
| | | | | G3717, G3718, G3841, G3843, |
| | | | | G3844, G3845, G3846, G3848, |
| | | | | G3852, G3856, G3857, G3858, |
| | | | | G3864, G3865 |
| 219 | G1040 | DNA | Arabidopsis | Predicted polypeptide sequence is |
| | | | thaliana | paralogous to G3034, G729, G730 |
| 220 | G1040 | PRT | Arabidopsis | Paralogous to G3034, G729, G730 |
| | | | thaliana | |
| 221 | G1047 | DNA | Arabidopsis | Predicted polypeptide sequence is |
| | | | thaliana | paralogous to G1808 |
| 222 | G1047 | PRT | Arabidopsis | Paralogous to G1808 |
| | | | thaliana | |
| 223 | G1198 | DNA | Arabidopsis | Predicted polypeptide sequence is |
| | | | thaliana | paralogous to G1806, G554, G555, |
| | | | | G556, G558, G578, G629 |
| 224 | G1198 | PRT | Arabidopsis | Paralogous to G1806, G554, G555, |
| | | | thaliana | G556, G558, G578, G629 |
| 225 | G1264 | DNA | Arabidopsis | Predicted polypeptide sequence is |
| | | | thaliana | paralogous to G1909 |
| 226 | G1264 | PRT | Arabidopsis | Paralogous to G1909 |
| | | | thaliana | |
| 227 | G1277 | DNA | Arabidopsis | Predicted polypeptide sequence is |
| | | | thaliana | paralogous to G12, G1379, G24; |
| | | | | orthologous to G3656 |
| 228 | G1277 | PRT | Arabidopsis | Paralogous to G12, G1379, G24; |
| | | | thaliana | Orthologous to G3656 |
| 229 | G1309 | DNA | Arabidopsis | Predicted polypeptide sequence is |
| | | | thaliana | paralogous to G237 |
| 230 | G1309 | PRT | Arabidopsis | Paralogous to G237 |
| | | | thaliana | |
| 231 | G1354 | DNA | Arabidopsis | Predicted polypeptide sequence is |
| | | | thaliana | paralogous to G1355, G1453, G1766, |
| | | | | G2534, G522, G761 |
| 232 | G1354 | PRT | Arabidopsis | Paralogous to G1355, G1453, G1766, |
| | | | thaliana | G2534, G522, G761 |
| 233 | G1355 | DNA | Arabidopsis | Predicted polypeptide sequence is |
| | | | thaliana | paralogous to G1354, G1453, G1766, |
| | | | | G2534, G522, G761 |
| 234 | G1355 | PRT | Arabidopsis | Paralogous to G1354, G1453, G1766, |
| | | | thaliana | G2534, G522, G761 |
| 235 | G1379 | DNA | Arabidopsis | Predicted polypeptide sequence is |
| | | | thaliana | paralogous to G12, G1277, G24; |
| | | | | orthologous to G3656 |
| 236 | G1379 | PRT | Arabidopsis | Paralogous to G12, G1277, G24; |
| | | | thaliana | Orthologous to G3656 |
| 237 | G1453 | DNA | Arabidopsis | Predicted polypeptide sequence is |
| | | | thaliana | paralogous to G1354, G1355, G1766, |
| | | | | G2534, G522, G761 |
| 238 | G1453 | PRT | Arabidopsis | Paralogous to G1354, G1355, G1766, |
| | | | thaliana | G2534, G522, G761 |
| 239 | G1461 | DNA | Arabidopsis | Predicted polypeptide sequence is |
| | | | thaliana | paralogous to G1462, G1463, G1464, |
| | | | | G1465 |
| 240 | G1461 | PRT | Arabidopsis | Paralogous to G1462, G1463, G1464, |
| | | | thaliana | G1465 |
| 241 | G1464 | DNA | Arabidopsis | Predicted polypeptide sequence is |
| | | | thaliana | paralogous to G1461, G1462, G1463, |
| | | | | G1465 |
| 242 | G1464 | PRT | Arabidopsis | Paralogous to G1461, G1462, G1463, |
| | | | thaliana | G1465 |
| 243 | G1465 | DNA | Arabidopsis | Predicted polypeptide sequence is |
| | | | thaliana | paralogous to G1461, G1462, G1463, |
| | | | | G1464 |
| 244 | G1465 | PRT | Arabidopsis | Paralogous to G1461, G1462, G1463, |
| | | | thaliana | G1464 |
| 245 | G1754 | DNA | Arabidopsis | Predicted polypeptide sequence is |
| | | | thaliana | paralogous to G1755 |
| 246 | G1754 | PRT | Arabidopsis | Paralogous to G1755 |
| | | | thaliana | |
| 247 | G1766 | DNA | Arabidopsis | Predicted polypeptide sequence is |
| | | | thaliana | paralogous to G1354, G1355, G1453, |
| | | | | G2534, G522, G761 |
| 248 | G1766 | PRT | Arabidopsis | Paralogous to G1354, G1355, G1453, |
| | | | thaliana | G2534, G522, G761 |
| 249 | G1792 | DNA | Arabidopsis | Predicted polypeptide sequence is |
| | | | thaliana | paralogous to G1791, G1795, G30; |
| | | | | orthologous to G3380, G3381, |
| | | | | G3383, G3515, G3516, G3517, |
| | | | | G3518, G3519, G3520, G3735, |
| | | | | G3736, G3737, G3794, G3739 |
| 250 | G1792 | PRT | Arabidopsis | Paralogous to G1791, G1795, G30; |
| | | | thaliana | Orthologous to G3380, G3381, |
| | | | | G3383, G3515, G3516, G3517, |
| | | | | G3518, G3519, G3520, G3735, |
| | | | | G3736, G3737, G3794, G3739 |
| 251 | G1795 | DNA | Arabidopsis | Predicted polypeptide sequence is |
| | | | thaliana | paralogous to G1791, G1792, G30; |
| | | | | orthologous to G3380, G3381, |
| | | | | G3383, G3515, G3516, G3517, |
| | | | | G3518, G3519, G3520, G3735, |
| | | | | G3736, G3737, G3794, G3739 |
| 252 | G1795 | PRT | Arabidopsis | Paralogous to G1791, G1792, G30; |
| | | | thaliana | Orthologous to G3380, G3381, |
| | | | | G3383, G3515, G3516, G3517, |
| | | | | G3518, G3519, G3520, G3735, |
| | | | | G3736, G3737, G3794, G3739 |
| 253 | G1806 | DNA | Arabidopsis | Predicted polypeptide sequence is |
| | | | thaliana | paralogous to G1198, G554, G555, |
| | | | | G556, G558, G578, G629 |
| 254 | G1806 | PRT | Arabidopsis | Paralogous to G1198, G554, G555, |
| | | | thaliana | G556, G558, G578, G629 |
| 255 | G1816 | DNA | Arabidopsis | Predicted polypeptide sequence is |
| | | | thaliana | paralogous to G225, G226, G2718, |
| | | | | G682; orthologous to G3392, G3393, |
| | | | | G3431, G3444, G3445, G3446, |
| | | | | G3447, G3448, G3449, G3450 |
| 256 | G1816 | PRT | Arabidopsis | Paralogous to G225, G226, G2718, |
| | | | thaliana | G682; Orthologous to G3392, G3393, |
| | | | | G3431, G3444, G3445, G3446, |
| | | | | G3447, G3448, G3449, G3450 |
| 257 | G1846 | DNA | Arabidopsis | Predicted polypeptide sequence is |
| | | | thaliana | paralogous to G1007 |
| 258 | G1846 | PRT | Arabidopsis | Paralogous to G1007 |
| | | | thaliana | |
| 259 | G1917 | DNA | Arabidopsis | Predicted polypeptide sequence is |
| | | | thaliana | paralogous to G383 |
| 260 | G1917 | PRT | Arabidopsis | Paralogous to G383 |
| | | | thaliana | |
| 261 | G2058 | DNA | Arabidopsis | Predicted polypeptide sequence is |
| | | | thaliana | paralogous to G1935, G2578 |
| 262 | G2058 | PRT | Arabidopsis | Paralogous to G1935, G2578 |
| | | | thaliana | |
| 263 | G2067 | DNA | Arabidopsis | Predicted polypeptide sequence is |
| | | | thaliana | paralogous to G2115, G2294, |
| | | | | orthologous to G3657 |
| 264 | G2067 | PRT | Arabidopsis | Paralogous to G2115, G2294; ortho- |
| | | | thaliana | logous to G3657 |
| 265 | G2115 | DNA | Arabidopsis | Predicted polypeptide sequence is |
| | | | thaliana | paralogous to G2067, G2294, ortho- |
| | | | | logous to G3657 |
| 266 | G2115 | PRT | Arabidopsis | Paralogous to G2067, G2294; ortho- |
| | | | thaliana | logous to G3657 |
| 267 | G2133 | DNA | Arabidopsis | Predicted polypeptide sequence is |
| | | | thaliana | paralogous to G47; orthologous to |
| | | | | G3643, G3644, G3645, G3646, |
| | | | | G3647, G3649, G3650, G3651 |
| 268 | G2133 | PRT | Arabidopsis | Paralogous to G47; Orthologous to |
| | | | thaliana | G3643, G3644, G3645, G3646, |
| | | | | G3647, G3649, G3650, G3651 |
| 269 | G2148 | DNA | Arabidopsis | Predicted polypeptide sequence is |
| | | | thaliana | paralogous to G2145 |
| 270 | G2148 | PRT | Arabidopsis | Paralogous to G2145 |
| | | | thaliana | |
| 271 | G2424 | DNA | Arabidopsis | Predicted polypeptide sequence is |
| | | | thaliana | paralogous to G1645 |
| 272 | G2424 | PRT | Arabidopsis | Paralogous to G1645 |
| | | | thaliana | |
| 273 | G2436 | DNA | Arabidopsis | Predicted polypeptide sequence is |
| | | | thaliana | paralogous to G2443, G328 |
| 274 | G2436 | PRT | Arabidopsis | Paralogous to G2443, G328 |
| | | | thaliana | |
| 275 | G2442 | DNA | Arabidopsis | Predicted polypeptide sequence is |
| | | | thaliana | paralogous to G1504, G2504 |
| 276 | G2442 | PRT | Arabidopsis | Paralogous to G1504, G2504 |
| | | | thaliana | |
| 277 | G2443 | DNA | Arabidopsis | Predicted polypeptide sequence is |
| | | | thaliana | paralogous to G2436, G328 |
| 278 | G2443 | PRT | Arabidopsis | Paralogous to G2436, G328 |
| | | | thaliana | |
| 279 | G2467 | DNA | Arabidopsis | Predicted polypeptide sequence is |
| | | | thaliana | paralogous to G812 |
| 280 | G2467 | PRT | Arabidopsis | Paralogous to G812 |
| | | | thaliana | |
| 281 | G2504 | DNA | Arabidopsis | Predicted polypeptide sequence is |
| | | | thaliana | paralogous to G1504, G2442 |
| 282 | G2504 | PRT | Arabidopsis | Paralogous to G1504, G2442 |
| | | | thaliana | |
| 283 | G2512 | DNA | Arabidopsis | Predicted polypeptide sequence is |
| | | | thaliana | paralogous to G1752 |
| 284 | G2512 | PRT | Arabidopsis | Paralogous to G1752 |
| | | | thaliana | |
| 285 | G2534 | DNA | Arabidopsis | Predicted polypeptide sequence is |
| | | | thaliana | paralogous to G1354, G1355, G1453, |
| | | | | G1766, G522, G761 |
| 286 | G2534 | PRT | Arabidopsis | Paralogous to G1354, G1355, G1453, |
| | | | thaliana | G1766, G522, G761 |
| 287 | G2578 | DNA | Arabidopsis | Predicted polypeptide sequence is |
| | | | thaliana | paralogous to G1935, G2058 |
| 288 | G2578 | PRT | Arabidopsis | Paralogous to G1935, G2058 |
| | | | thaliana | |
| 289 | G2629 | DNA | Arabidopsis | Predicted polypeptide sequence is |
| | | | thaliana | paralogous to G1053 |
| 290 | G2629 | PRT | Arabidopsis | Paralogous to G1053 |
| | | | thaliana | |
| 291 | G2635 | DNA | Arabidopsis | Predicted polypeptide sequence is |
| | | | thaliana | paralogous to G2505 |
| 292 | G2635 | PRT | Arabidopsis | Paralogous to G2505 |
| | | | thaliana | |
| 293 | G2718 | DNA | Arabidopsis | Predicted polypeptide sequence is |
| | | | thaliana | paralogous to G1816, G225, G226, |
| | | | | G682, G3930; orthologous to G3392, |
| | | | | G3393, G3431, G3444, G3445, |
| | | | | G3446, G3447, G3448, G3449, |
| | | | | G3450 |
| 294 | G2718 | PRT | Arabidopsis | Paralogous to G1816, G225, G226, |
| | | | thaliana | G682, G3930; Orthologous to G3392, |
| | | | | G3393, G3431, G3444, G3445, |
| | | | | G3446, G3447, G3448, G3449, |
| | | | | G3450 |
| 295 | G2893 | DNA | Arabidopsis | Predicted polypeptide sequence is |
| | | | thaliana | paralogous to G1324 |
| 296 | G2893 | PRT | Arabidopsis | Paralogous to G1324 |
| | | | thaliana | |
| 297 | G3034 | DNA | Arabidopsis | Predicted polypeptide sequence is |
| | | | thaliana | paralogous to G1040, G729, G730 |
| 298 | G3034 | PRT | Arabidopsis | Paralogous to G1040, G729, G730 |
| | | | thaliana | |
| 299 | G3380 | DNA | Oryza sativa | Predicted polypeptide sequence is |
| | | | (japonica | paralogous to G3381, G3383, G3515, |
| | | | cultivar- | G3737; orthologous to G1791, |
| | | | group) | G1792, G1795, G30, G3516, G3517, |
| | | | | G3518, G3519, G3520, G3735, |
| | | | | G3736, G3794, G3739 |
| 300 | G3380 | PRT | Oryza sativa | Paralogous to G3381, G3383, G3515, |
| | | | (japonica | G3737; Orthologous to G1791, |
| | | | cultivar- | G1792, G1795, G30, G3516, G3517, |
| | | | group) | G3518, G3519, G3520, G3735, |
| | | | | G3736, G3794, G3739 |
| 301 | G3381 | DNA | Oryza sativa | Predicted polypeptide sequence is |
| | | | (japonica | paralogous to G3380, G3383, G3515, |
| | | | cultivar- | G3737; orthologous to G1791, |
| | | | group) | G1792, G1795, G30, G3516, G3517, |
| | | | | G3518, G3519, G3520, G3735, |
| | | | | G3736, G3794, G3739 |
| 302 | G3381 | PRT | Oryza sativa | Paralogous to G3380, G3383, G3515, |
| | | | (japonica | G3737; Orthologous to G1791, |
| | | | cultivar- | G1792, G1795, G30, G3516, G3517, |
| | | | group) | G3518, G3519, G3520, G3735, |
| | | | | G3736, G3794, G3739 |
| 303 | G3383 | DNA | Oryza sativa | Predicted polypeptide sequence is |
| | | | (japonica | paralogous to G3380, G3381, G3515, |
| | | | cultivar- | G3737; orthologous to G1791, |
| | | | group) | G1792, G1795, G30, G3516, G3517, |
| | | | | G3518, G3519, G3520, G3735, |
| | | | | G3736, G3794, G3739 |
| 304 | G3383 | PRT | Oryza sativa | Paralogous to G3380, G3381, G3515, |
| | | | (japonica | G3737; Orthologous to G1791, |
| | | | cultivar- | G1792, G1795, G30, G3516, G3517, |
| | | | group) | G3518, G3519, G3520, G3735, |
| | | | | G3736, G3794, G3739 |
| 305 | G3392 | DNA | Oryza sativa | Predicted polypeptide sequence is |
| | | | (japonica | paralogous to G3393; orthologous to |
| | | | cultivar- | G1816, G225, G226, G2718, G682, |
| | | | group) | G3431, G3444, G3445, G3446, |
| | | | | G3447, G3448, G3449, G3450, |
| | | | | G3930 |
| 306 | G3392 | PRT | Oryza sativa | Paralogous to G3393; Orthologous to |
| | | | (japonica | G1816, G225, G226, G2718, G682, |
| | | | cultivar- | G3431, G3444, G3445, G3446, |
| | | | group) | G3447, G3448, G3449, G3450, |
| | | | | G3930 |
| 307 | G3393 | DNA | Oryza sativa | Predicted polypeptide sequence is |
| | | | (japonica | paralogous to G3392; orthologous to |
| | | | cultivar- | G1816, G225, G226, G2718, G682, |
| | | | group) | G3431, G3444, G3445, G3446, |
| | | | | G3447, G3448, G3449, G3450, |
| | | | | G3930 |
| 308 | G3393 | PRT | Oryza sativa | Paralogous to G3392; Orthologous to |
| | | | (japonica | G1816, G225, G226, G2718, G682, |
| | | | cultivar- | G3431, G3444, G3445, G3446, |
| | | | group) | G3447, G3448, G3449, G3450, |
| | | | | G3930 |
| 309 | G3430 | DNA | Oryza sativa | Predicted polypeptide sequence is |
| | | | (japonica | paralogous to G3848; orthologous to |
| | | | cultivar- | G22, G1006, G28, G3659, G3660, |
| | | | group) | G3661, G3717, G3718, G3841, |
| | | | | G3843, G3844, G3845, G3846, |
| | | | | G3852, G3856, G3857, G3858, |
| | | | | G3864, G3865 |
| 310 | G3430 | PRT | Oryza sativa | Paralogous to G3848; Orthologous to |
| | | | (japonica | G22, G1006, G28, G3659, G3660, |
| | | | cultivar- | G3661, G3717, G3718, G3841, |
| | | | group) | G3843, G3844, G3845, G3846, |
| | | | | G3852, G3856, G3857, G3858, |
| | | | | G3864, G3865 |
| 311 | G3431 | DNA | Zea mays | Predicted polypeptide sequence is |
| | | | | paralogous to G3444; orthologous to |
| | | | | G1816, G225, G226, G2718, G682, |
| | | | | G3392, G3393, G3445, G3446, |
| | | | | G3447, G3448, G3449, G3450, |
| | | | | G3930 |
| 312 | G3431 | PRT | Zea mays | Paralogous to G3444; Orthologous to |
| | | | | G1816, G225, G226, G2718, G682, |
| | | | | G3392, G3393, G3445, G3446, |
| | | | | G3447, G3448, G3449, G3450, |
| | | | | G3930 |
| 313 | G3444 | DNA | Zea mays | Predicted polypeptide sequence is |
| | | | | paralogous to G3431; orthologous to |
| | | | | G1816, G225, G226, G2718, G682, |
| | | | | G3392, G3393, G3445, G3446, |
| | | | | G3447, G3448, G3449, G3450, |
| | | | | G3930 |
| 314 | G3444 | PRT | Zea mays | Paralogous to G3431; Orthologous to |
| | | | | G1816, G225, G226, G2718, G682, |
| | | | | G3392, G3393, G3445, G3446, |
| | | | | G3447, G3448, G3449, G3450, |
| | | | | G3930 |
| 315 | G3445 | DNA | Glycine max | Predicted polypeptide sequence is |
| | | | | paralogous to G3446, G3447, G3448, |
| | | | | G3449, G3450; orthologous to |
| | | | | G1816, G225, G226, G2718, G682, |
| | | | | G3392, G3393, G3431, G3444, |
| | | | | G3930 |
| 316 | G3445 | PRT | Glycine max | Paralogous to G3446, G3447, G3448, |
| | | | | G3449, G3450; Orthologous to |
| | | | | G1816, G225, G226, G2718, G682, |
| | | | | G3392, G3393, G3431, G3444, |
| | | | | G3930 |
| 317 | G3446 | DNA | Glycine max | Predicted polypeptide sequence is |
| | | | | paralogous to G3445, G3447, G3448, |
| | | | | G3449, G3450; orthologous to |
| | | | | G1816, G225, G226, G2718, G682, |
| | | | | G3392, G3393, G3431, G3444, |
| | | | | G3930 |
| 318 | G3446 | PRT | Glycine max | Paralogous to G3445, G3447, G3448, |
| | | | | G3449, G3450; Orthologous to |
| | | | | G1816, G225, G226, G2718, G682, |
| | | | | G3392, G3393, G3431, G3444, G3930 |
| 319 | G3447 | DNA | Glycine max | Predicted polypeptide sequence is |
| | | | | paralogous to G3445, G3446, G3448, |
| | | | | G3449, G3450; orthologous to |
| | | | | G1816, G225, G226, G2718, G682, |
| | | | | G3392, G3393, G3431, G3444, |
| | | | | G3930 |
| 320 | G3447 | PRT | Glycine max | Paralogous to G3445, G3446, G3448, |
| | | | | G3449, G3450; Orthologous to |
| | | | | G1816, G225, G226, G2718, G682, |
| | | | | G3392, G3393, G3431, G3444, |
| | | | | G3930 |
| 321 | G3448 | DNA | Glycine max | Predicted polypeptide sequence is |
| | | | | paralogous to G3445, G3446, G3447, |
| | | | | G3449, G3450; orthologous to |
| | | | | G1816, G225, G226, G2718, G682, |
| | | | | G3392, G3393, G3431, G3444, |
| | | | | G3930 |
| 322 | G3448 | PRT | Glycine max | Paralogous to G3445, G3446, G3447, |
| | | | | G3449, G3450; Orthologous to |
| | | | | G1816, G225, G226, G2718, G682, |
| | | | | G3392, G3393, G3431, G3444, |
| | | | | G3930 |
| 323 | G3449 | DNA | Glycine max | Predicted polypeptide sequence is |
| | | | | paralogous to G3445, G3446, G3447, |
| | | | | G3448, G3450; orthologous to |
| | | | | G1816, G225, G226, G2718, G682, |
| | | | | G3392, G3393, G3431, G3444, |
| | | | | G3930 |
| 324 | G3449 | PRT | Glycine max | Paralogous to G3445, G3446, G3447, |
| | | | | G3448, G3450; Orthologous to |
| | | | | G1816, G225, G226, G2718, G682, |
| | | | | G3392, G3393, G3431, G3444, |
| | | | | G3930 |
| 325 | G3450 | DNA | Glycine max | Predicted polypeptide sequence is |
| | | | | paralogous to G3445, G3446, G3447, |
| | | | | G3448, G3449; orthologous to |
| | | | | G1816, G225, G226, G2718, G682, |
| | | | | G3392, G3393, G3431, G3444, |
| | | | | G3930 |
| 326 | G3450 | PRT | Glycine max | Paralogous to G3445, G3446, G3447, |
| | | | | G3448, G3449; Orthologous to |
| | | | | G1816, G225, G226, G2718, G682, |
| | | | | G3392, G3393, G3431, G3444, |
| | | | | G3930 |
| 327 | G3490 | DNA | Zea mays | Predicted polypeptide sequence is |
| | | | | orthologous to G1543, G3510, G3524 |
| 328 | G3490 | PRT | Zea mays | Orthologous to G1543, G3510, |
| | | | | G3524 |
| 825 | G3510 | DNA | Oryza sativa | Predicted polypeptide sequence is |
| | | | (japonica | orthologous to G1543, G3490, G3524 |
| | | | cultivar- | |
| | | | group) | |
| 826 | G3510 | PRT | Oryza sativa | Orthologous to G1543, G3490, G3524 |
| | | | (japonica | |
| | | | cultivar- | |
| | | | group) | |
| 329 | G3515 | DNA | Oryza sativa | Predicted polypeptide sequence is |
| | | | (japonica | paralogous to G3380, G3381, G3383, |
| | | | cultivar- | G3737; orthologous to G1791, |
| | | | group) | G1792, G1795, G30, G3516, G3517, |
| | | | | G3518, G3519, G3520, G3735, |
| | | | | G3736, G3794, G3739 |
| 330 | G3515 | PRT | Oryza sativa | Paralogous to G3380, G3381, G3383, |
| | | | (japonica | G3737; Orthologous to G1791, |
| | | | cultivar- | G1792, G1795, G30, G3516, G3517, |
| | | | group) | G3518, G3519, G3520, G3735, |
| | | | | G3736, G3794, G3739 |
| 331 | G3516 | DNA | Zea mays | Predicted polypeptide sequence is |
| | | | | paralogous to G3517, G3794, G3739; |
| | | | | orthologous to G1791, G1792, |
| | | | | G1795, G30, G3380, G3381, G3383, |
| | | | | G3515, G3518, G3519, G3520, |
| | | | | G3735, G3736, G3737 |
| 332 | G3516 | PRT | Zea mays | Paralogous to G3517, G3794, G3739; |
| | | | | Orthologous to G1791, G1792, |
| | | | | G1795, G30, G3380, G3381, G3383, G3515, G3518, G3519, G3520, G3735, G3736, G3737 |
| 333 | G3517 | DNA | Zea mays | Predicted polypeptide sequence is |
| | | | | paralogous to G3516, G3794, G3739; |
| | | | | orthologous to G1791, G1792, |
| | | | | G1795, G30, G3380, G3381, G3383, |
| | | | | G3515, G3518, G3519, G3520, |
| | | | | G3735, G3736, G3737 |
| 334 | G3517 | PRT | Zea mays | Paralogous to G3516, G3794, G3739; |
| | | | | Orthologous to G1791, G1792, |
| | | | | G1795, G30, G3380, G3381, G3383, |
| | | | | G3515, G3518, G3519, G3520, |
| | | | | G3735, G3736, G3737 |
| 335 | G3518 | DNA | Glycine max | Predicted polypeptide sequence is |
| | | | | paralogous to G3519, G3520; ortho- |
| | | | | logous to G1791, G1792, G1795, |
| | | | | G30, G3380, G3381, G3383, G3515, |
| | | | | G3516, G3517, G3735, G3736, |
| | | | | G3737, G3794, G3739 |
| 336 | G3518 | PRT | Glycine max | Paralogous to G3519, G3520; Ortho- |
| | | | | logous to G1791, G1792, G1795, |
| | | | | G30, G3380, G3381, G3383, G3515, |
| | | | | G3516, G3517, G3735, G3736, |
| | | | | G3737, G3794, G3739 |
| 337 | G3519 | DNA | Glycine max | Predicted polypeptide sequence is |
| | | | | paralogous to G3518, G3520; ortho- |
| | | | | logous to G1791, G1792, G1795, |
| | | | | G30, G3380, G3381, G3383, G3515, |
| | | | | G3516, G3517, G3735, G3736, |
| | | | | G3737, G3794, G3739 |
| 338 | G3519 | PRT | Glycine max | Paralogous to G3518, G3520; Ortho- |
| | | | | logous to G1791, G1792, G1795, |
| | | | | G30, G3380, G3381, G3383, G3515, |
| | | | | G3516, G3517, G3735, G3736, |
| | | | | G3737, G3794, G3739 |
| 339 | G3520 | DNA | Glycine max | Predicted polypeptide sequence is |
| | | | | paralogous to G3518, G3519; ortho- |
| | | | | logous to G1791, G1792, G1795, |
| | | | | G30, G3380, G3381, G3383, G3515, |
| | | | | G3516, G3517, G3735, G3736, |
| | | | | G3737, G3794, G3739 |
| 340 | G3520 | PRT | Glycine max | Paralogous to G3518, G3519; Ortho- |
| | | | | logous to G1791, G1792, G1795, |
| | | | | G30, G3380, G3381, G3383, G3515, |
| | | | | G3516, G3517, G3735, G3736, |
| | | | | G3737, G3794, G3739 |
| 341 | G3524 | DNA | Glycine max | Predicted polypeptide sequence is |
| | | | | orthologous to G1543, G3510, G3490 |
| 342 | G3524 | PRT | Glycine max | Orthologous to G1543, G3510, G3490 |
| 343 | G3643 | DNA | Glycine max | Predicted polypeptide sequence is |
| | | | | orthologous to G2133, G47, G3644, |
| | | | | G3645, G3646, G3647, G3649, |
| | | | | G3650, G3651 |
| 344 | G3643 | PRT | Glycine max | Orthologous to G2133, G47, G3644, |
| | | | | G3645, G3646, G3647, G3649, |
| | | | | G3650, G3651 |
| 345 | G3644 | DNA | Oryza sativa | Predicted polypeptide sequence is |
| | | | (japonica | paralogous to G3649, G3651; ortho- |
| | | | cultivar- | logous to G2133, G47, G3643, |
| | | | group) | G3645, G3646, G3647, G3650 |
| 346 | G3644 | PRT | Oryza sativa | Paralogous to G3649, G3651; Ortho- |
| | | | (japonica | logous to G2133, G47, G3643, |
| | | | cultivar- | G3645, G3646, G3647, G3650 |
| | | | group) | |
| 347 | G3645 | DNA | Brassica | Predicted polypeptide sequence is |
| | | | rapa subsp. | orthologous to G2133, G47, G3643, |
| | | | Pekinensis | G3644, G3646, G3647, G3649, |
| | | | | G3650, G3651 |
| 348 | G3645 | PRT | Brassica | Orthologous to G2133, G47, G3643, |
| | | | rapa subsp. | G3644, G3646, G3647, G3649, |
| | | | Pekinensis | G3650, G3651 |
| 349 | G3646 | DNA | Brassica | Predicted polypeptide sequence is |
| | | | oleracea | orthologous to G2133, G47, G3643, |
| | | | | G3644, G3645, G3647, G3649, |
| | | | | G3650, G3651 |
| 350 | G3646 | PRT | Brassica | Orthologous to G2133, G47, G3643, |
| | | | oleracea | G3644, G3645, G3647, G3649, |
| | | | | G3650, G3651 |
| 351 | G3647 | DNA | Zinnia | Predicted polypeptide sequence is |
| | | | elegans | orthologous to G2133, G47, G3643, |
| | | | | G3644, G3645, G3646, G3649, |
| | | | | G3650, G3651 |
| 352 | G3647 | PRT | Zinnia | Orthologous to G2133, G47, G3643, |
| | | | elegans | G3644, G3645, G3646, G3649, |
| | | | | G3650, G3651 |
| 353 | G3649 | DNA | Oryza sativa | Predicted polypeptide sequence is |
| | | | (japonica | paralogous to G3644, G3651; ortho- |
| | | | cultivar- | logous to G2133, G47, G3643, |
| | | | group) | G3645, G3646, G3647, G3650 |
| 354 | G3649 | PRT | Oryza sativa | Paralogous to G3644, G3651; Ortho- |
| | | | (japonica | logous to G2133, G47, G3643, |
| | | | cultivar- | G3645, G3646, G3647, G3650 |
| | | | group) | |
| 827 | G3650 | DNA | Zea mays | Predicted polypeptide sequence is |
| | | | | orthologous to G2133, G47, G3643, |
| | | | | G3644, G3645, G3646, G3647, |
| | | | | G3649, G3651 |
| 828 | G3650 | PRT | Zea mays | Orthologous to G2133, G47, G3643, |
| | | | | G3644, G3645, G3646, G3647, |
| | | | | G3649, G3651 |
| 355 | G3651 | DNA | Oryza sativa | Predicted polypeptide sequence is |
| | | | (japonica | paralogous to G3644, G3649; ortho- |
| | | | cultivar- | logous to G2133, G47, G3643, |
| | | | group) | G3645, G3646, G3647, G3650 |
| 356 | G3651 | PRT | Oryza sativa | Paralogous to G3644, G3649; Ortho- |
| | | | (japonica | logous to G2133, G47, G3643, |
| | | | cultivar- | G3645, G3646, G3647, G3650 |
| | | | group) | |
| 357 | G3656 | DNA | Zea mays | Predicted polypeptide sequence is |
| | | | | orthologous to G12, G1277, G1379, |
| | | | | G24 |
| 358 | G3656 | PRT | Zea mays | Orthologous to G12, G1277, G1379, |
| | | | | G24 |
| 829 | G3657 | DNA | Oryza sativa | Predicted polypeptide sequence is |
| | | | (japonica | orthologous to G2294, G2067, G2115 |
| | | | cultivar- | |
| | | | group) | |
| 830 | G3657 | PRT | Oryza sativa | Orthologous to G2294, G2067, |
| | | | (japonica | G2115 |
| | | | cultivar- | |
| | | | group) | |
| 359 | G3659 | DNA | Brassica | Predicted polypeptide sequence is |
| | | | oleracea | paralogous to G3660; orthologous to |
| | | | | G22, G1006, G28, G3430, G3661, |
| | | | | G3717, G3718, G3841, G3843, |
| | | | | G3844, G3845, G3846, G3848, |
| | | | | G3852, G3856, G3857, G3858, |
| | | | | G3864, G3865 |
| 360 | G3659 | PRT | Brassica | Paralogous to G3660; Orthologous to |
| | | | oleracea | G22, G1006, G28, G3430, G3661, |
| | | | | G3717, G3718, G3841, G3843, |
| | | | | G3844, G3845, G3846, G3848, |
| | | | | G3852, G3856, G3857, G3858, |
| | | | | G3864, G3865 |
| 361 | G3660 | DNA | Brassica | Predicted polypeptide sequence is |
| | | | oleracea | paralogous to G3659; orthologous to |
| | | | | G22, G1006, G28, G3430, G3661, |
| | | | | G3717, G3718, G3841, G3843, |
| | | | | G3844, G3845, G3846, G3848, |
| | | | | G3852, G3856, G3857, G3858, |
| | | | | G3864, G3865 |
| 362 | G3660 | PRT | Brassica | Paralogous to G3659; Orthologous to |
| | | | oleracea | G22, G1006, G28, G3430, G3661, |
| | | | | G3717, G3718, G3841, G3843, |
| | | | | G3844, G3845, G3846, G3848, |
| | | | | G3852, G3856, G3857, G3858, |
| | | | | G3864, G3865 |
| 363 | G3661 | DNA | Zea mays | Predicted polypeptide sequence is |
| | | | | paralogous to G3856; orthologous |
| | | | | to G22, G1006, G28, G3430, G3659, |
| | | | | G3660, G3717, G3718, G3841, |
| | | | | G3843, G3844, G3845, G3846, |
| | | | | G3848, G3852, G3857, G3858, |
| | | | | G3864, G3865 |
| 364 | G3661 | PRT | Zea mays | Paralogous to G3856; Orthologous to |
| | | | | G22, G1006, G28, G3430, G3659, |
| | | | | G3660, G3717, G3718, G3841, |
| | | | | G3843, G3844, G3845, G3846, |
| | | | | G3848, G3852, G3857, G3858, |
| | | | | G3864, G3865 |
| 365 | G3717 | DNA | Glycine max | Predicted polypeptide sequence is |
| | | | | paralogous to G3718; orthologous to |
| | | | | G22, G1006, G28, G3430, G3659, |
| | | | | G3660, G3661, G3841, G3843, |
| | | | | G3844, G3845, G3846, G3848, |
| | | | | G3852, G3856, G3857, G3858, |
| | | | | G3864, G3865 |
| 366 | G3717 | PRT | Glycine max | Paralogous to G3718; Orthologous to |
| | | | | G22, G1006, G28, G3430, G3659, |
| | | | | G3660, G3661, G3841, G3843, |
| | | | | G3844, G3845, G3846, G3848, |
| | | | | G3852, G3856, G3857, G3858, |
| | | | | G3864, G3865 |
| 367 | G3718 | DNA | Glycine max | Predicted polypeptide sequence is |
| | | | | paralogous to G3717; orthologous to |
| | | | | G22, G1006, G28, G3430, G3659, |
| | | | | G3660, G3661, G3841, G3843, |
| | | | | G3844, G3845, G3846, G3848, |
| | | | | G3852, G3856, G3857, G3858, |
| | | | | G3864, G3865 |
| 368 | G3718 | PRT | Glycine max | Paralogous to G3717; Orthologous to |
| | | | | G22, G1006, G28, G3430, G3659, |
| | | | | G3660, G3661, G3841, G3843, |
| | | | | G3844, G3845, G3846, G3848, |
| | | | | G3852, G3856, G3857, G3858, |
| | | | | G3864, G3865 |
| 369 | G3735 | DNA | Medicago | Predicted polypeptide sequence is |
| | | | truncatula | orthologous to G1791, G1792, |
| | | | | G1795, G30, G3380, G3381, G3383, |
| | | | | G3515, G3516, G3517, G3518, |
| | | | | G3519, G3520, G3736, G3737, |
| | | | | G3794, G3739 |
| 370 | G3735 | PRT | Medicago | Orthologous to G1791, G1792, |
| | | | truncatula | G1795, G30, G3380, G3381, G3383, |
| | | | | G3515, G3516, G3517, G3518, |
| | | | | G3519, G3520, G3736, G3737, |
| | | | | G3794, G3739 |
| 371 | G3736 | DNA | Triticum | Predicted polypeptide sequence is |
| | | | aestivum | orthologous to G1791, G1792, |
| | | | | G1795, G30, G3380, G3381, G3383, |
| | | | | G3515, G3516, G3517, G3518, |
| | | | | G3519, G3520, G3735, G3737, |
| | | | | G3794, G3739 |
| 372 | G3736 | PRT | Triticum | Orthologous to G1791, G1792, |
| | | | aestivum | G1795, G30, G3380, G3381, G3383, |
| | | | | G3515, G3516, G3517, G3518, |
| | | | | G3519, G3520, G3735, G3737, |
| | | | | G3794, G3739 |
| 373 | G3737 | DNA | Oryza sativa | Predicted polypeptide sequence is |
| | | | (japonica | paralogous to G3380, G3381, G3383, |
| | | | cultivar- | G3515; orthologous to G1791, |
| | | | group) | G1792, G1795, G30, G3516, G3517, |
| | | | | G3518, G3519, G3520, G3735, |
| | | | | G3736, G3794, G3739 |
| 374 | G3737 | PRT | Oryza sativa | Paralogous to G3380, G3381, G3383, |
| | | | (japonica | G3515; Orthologous to G1791, |
| | | | cultivar- | G1792, G1795, G30, G3516, G3517, |
| | | | group) | G3518, G3519, G3520, G3735, |
| | | | | G3736, G3794, G3739 |
| 375 | G3739 | DNA | Zea mays | Predicted polypeptide sequence is |
| | | | | paralogous to G3516, G3517, G3794; |
| | | | | orthologous to G1791, G1792, |
| | | | | G1795, G30, G3380, G3381, G3383, |
| | | | | G3515, G3518, G3519, G3520, |
| | | | | G3735, G3736, G3737 |
| 376 | G3739 | PRT | Zea mays | Paralogous to G3516, G3517, G3794; |
| | | | | Orthologous to G1791, G1792, |
| | | | | G1795, G30, G3380, G3381, G3383, |
| | | | | G3515, G3518, G3519, G3520, |
| | | | | G3735, G3736, G3737 |
| 377 | G3794 | DNA | Zea mays | Predicted polypeptide sequence is |
| | | | | paralogous to G3516, G3517, G3739; |
| | | | | orthologous to G1791, G1792, |
| | | | | G1795, G30, G3380, G3381, G3383, |
| | | | | G3515, G3518, G3519, G3520, |
| | | | | G3735, G3736, G3737 |
| 378 | G3794 | PRT | Zea mays | Paralogous to G3516, G3517, G3739; |
| | | | | Orthologous to G1791, G1792, |
| | | | | G1795, G30, G3380, G3381, G3383, |
| | | | | G3515, G3518, G3519, G3520, |
| | | | | G3735, G3736, G3737 |
| 379 | G3841 | DNA | Lycopersicon | Predicted polypeptide sequence is |
| | | | esculentum | paralogous to G3843, G3852; ortho- |
| | | | | logous to G22, G1006, G28, G3430, |
| | | | | G3659, G3660, G3661, G3717, |
| | | | | G3718, G3844, G3845, G3846, |
| | | | | G3848, G3856, G3857, G3858, |
| | | | | G3864, G3865 |
| 380 | G3841 | PRT | Lycopersicon | Paralogous to G3843, G3852; Ortho- |
| | | | esculentum | logous to G22, G1006, G28, G3430, |
| | | | | G3659, G3660, G3661, G3717, |
| | | | | G3718, G3844, G3845, G3846, |
| | | | | G3848, G3856, G3857, G3858, |
| | | | | G3864, G3865 |
| 381 | G3843 | DNA | Lycopersicon | Predicted polypeptide sequence is |
| | | | esculentum | paralogous to G3841, G3852; ortho- |
| | | | | logous to G22, G1006, G28, G3430, |
| | | | | G3659, G3660, G3661, G3717, |
| | | | | G3718, G3844, G3845, G3846, |
| | | | | G3848, G3856, G3857, G3858, |
| | | | | G3864, G3865 |
| 382 | G3843 | PRT | Lycopersicon | Paralogous to G3841, G3852; Ortho- |
| | | | esculentum | logous to G22, G1006, G28, G3430, |
| | | | | G3659, G3660, G3661, G3717, |
| | | | | G3718, G3844, G3845, G3846, |
| | | | | G3848, G3856, G3857, G3858, |
| | | | | G3864, G3865 |
| 383 | G3844 | DNA | Medicago | Predicted polypeptide sequence is |
| | | | truncatula | orthologous to G22, G1006, G28, |
| | | | | G3430, G3659, G3660, G3661, |
| | | | | G3717, G3718, G3841, G3843, |
| | | | | G3845, G3846, G3848, G3852, |
| | | | | G3856, G3857, G3858, G3864, |
| | | | | G3865 |
| 384 | G3844 | PRT | Medicago | Orthologous to G22, G1006, G28, |
| | | | truncatula | G3430, G3659, G3660, G3661, |
| | | | | G3717, G3718, G3841, G3843, |
| | | | | G3845, G3846, G3848, G3852, |
| | | | | G3856, G3857, G3858, G3864, |
| | | | | G3865 |
| 385 | G3845 | DNA | Nicotiana | Predicted polypeptide sequence is |
| | | | tabacum | paralogous to G3846; orthologous to |
| | | | | G22, G1006, G28, G3430, G3659, |
| | | | | G3660, G3661, G3717, G3718, |
| | | | | G3841, G3843, G3844, G3848, |
| | | | | G3852, G3856, G3857, G3858, |
| | | | | G3864, G3865 |
| 386 | G3845 | PRT | Nicotiana | Paralogous to G3846; Orthologous to |
| | | | tabacum | G22, G1006, G28, G3430, G3659, |
| | | | | G3660, G3661, G3717, G3718, |
| | | | | G3841, G3843, G3844, G3848, |
| | | | | G3852, G3856, G3857, G3858, |
| | | | | G3864, G3865 |
| 387 | G3846 | DNA | Nicotiana | Predicted polypeptide sequence is |
| | | | tabacum | paralogous to G3845; orthologous to |
| | | | | G22, G1006, G28, G3430, G3659, |
| | | | | G3660, G3661, G3717, G3718, |
| | | | | G3841, G3843, G3844, G3848, |
| | | | | G3852, G3856, G3857, G3858, |
| | | | | G3864, G3865 |
| 388 | G3846 | PRT | Nicotiana | Paralogous to G3845; Orthologous to |
| | | | tabacum | G22, G1006, G28, G3430, G3659, |
| | | | | G3660, G3661, G3717, G3718, |
| | | | | G3841, G3843, G3844, G3848, |
| | | | | G3852, G3856, G3857, G3858, |
| | | | | G3864, G3865 |
| 389 | G3848 | DNA | Oryza sativa | Predicted polypeptide sequence is |
| | | | (japonica | paralogous to G3430; orthologous to |
| | | | cultivar- | G22, G1006, G28, G3659, G3660, |
| | | | group) | G3661, G3717, G3718, G3841, |
| | | | | G3843, G3844, G3845, G3846, |
| | | | | G3852, G3856, G3857, G3858, |
| | | | | G3864, G3865 |
| 390 | G3848 | PRT | Oryza sativa | Paralogous to G3430; Orthologous to |
| | | | (japonica | G22, G1006, G28, G3659, G3660, |
| | | | cultivar- | G3661, G3717, G3718, G3841, |
| | | | group) | G3843, G3844, G3845, G3846, |
| | | | | G3852, G3856, G3857, G3858, |
| | | | | G3864, G3865 |
| 391 | G3852 | DNA | Lycopersicon | Predicted polypeptide sequence is |
| | | | esculentum | paralogous to G3841, G3843; ortho- |
| | | | | logous to G22, G1006, G28, G3430, |
| | | | | G3659, G3660, G3661, G3717, |
| | | | | G3718, G3844, G3845, G3846, |
| | | | | G3848, G3856, G3857, G3858, |
| | | | | G3864, G3865 |
| 392 | G3852 | PRT | Lycopersicon | Paralogous to G3841, G3843; Ortho- |
| | | | esculentum | logous to G22, G1006, G28, G3430, |
| | | | | G3659, G3660, G3661, G3717, |
| | | | | G3718, G3844, G3845, G3846, |
| | | | | G3848, G3856, G3857, G3858, |
| | | | | G3864, G3865 |
| 393 | G3856 | DNA | Zea mays | Predicted polypeptide sequence is |
| | | | | paralogous to G3661; orthologous to |
| | | | | G22, G1006, G28, G3430, G3659, |
| | | | | G3660, G3717, G3718, G3841, |
| | | | | G3843, G3844, G3845, G3846, |
| | | | | G3848, G3852, G3857, G3858, |
| | | | | G3864, G3865 |
| 394 | G3856 | PRT | Zea mays | Paralogous to G3661; Orthologous to |
| | | | | G22, G1006, G28, G3430, G3659, |
| | | | | G3660, G3717, G3718, G3841, |
| | | | | G3843, G3844, G3845, G3846, |
| | | | | G3848, G3852, G3857, G3858, |
| | | | | G3864, G3865 |
| 395 | G3857 | DNA | Solanum | Predicted polypeptide sequence is |
| | | | tuberosum | paralogous to G3858; orthologous to |
| | | | | G22, G1006, G28, G3430, G3659, |
| | | | | G3660, G3661, G3717, G3718, |
| | | | | G3841, G3843, G3844, G3845, |
| | | | | G3846, G3848, G3852, G3856, |
| | | | | G3864, G3865 |
| 396 | G3857 | PRT | Solanum | Paralogous to G3858; Orthologous to |
| | | | tuberosum | G22, G1006, G28, G3430, G3659, |
| | | | | G3660, G3661, G3717, G3718, |
| | | | | G3841, G3843, G3844, G3845, |
| | | | | G3846, G3848, G3852, G3856, |
| | | | | G3864, G3865 |
| 397 | G3858 | DNA | Solanum | Predicted polypeptide sequence is |
| | | | tuberosum | paralogous to G3857; orthologous to |
| | | | | G22, G1006, G28, G3430, G3659, |
| | | | | G3660, G3661, G3717, G3718, |
| | | | | G3841, G3843, G3844, G3845, |
| | | | | G3846, G3848, G3852, G3856, |
| | | | | G3864, G3865 |
| 398 | G3858 | PRT | Solanum | Paralogous to G3857; Orthologous to |
| | | | tuberosum | G22, G1006, G28, G3430, G3659, |
| | | | | G3660, G3661, G3717, G3718, |
| | | | | G3841, G3843, G3844, G3845, |
| | | | | G3846, G3848, G3852, G3856, |
| | | | | G3864, G3865 |
| 399 | G3864 | DNA | Triticum | Predicted polypeptide sequence is |
| | | | aestivum | paralogous to G3865; orthologous to |
| | | | | G22, G1006, G28, G3430, G3659, |
| | | | | G3660, G3661, G3717, G3718, |
| | | | | G3841, G3843, G3844, G3845, |
| | | | | G3846, G3848, G3852, G3856, |
| | | | | G3857, G3858 |
| 400 | G3864 | PRT | Triticum | Paralogous to G3865; Orthologous to |
| | | | aestivum | G22, G1006, G28, G3430, G3659, |
| | | | | G3660, G3661, G3717, G3718, |
| | | | | G3841, G3843, G3844, G3845, |
| | | | | G3846, G3848, G3852, G3856, |
| | | | | G3857, G3858 |
| 401 | G3865 | DNA | Triticum | Predicted polypeptide sequence is |
| | | | aestivum | paralogous to G3864; orthologous to |
| | | | | G22, G1006, G28, G3430, G3659, |
| | | | | G3660, G3661, G3717, G3718, |
| | | | | G3841, G3843, G3844, G3845, |
| | | | | G3846, G3848, G3852, G3856, |
| | | | | G3857, G3858 |
| 402 | G3865 | PRT | Triticum | Paralogous to G3864; Orthologous to |
| | | | aestivum | G22, G1006, G28, G3430, G3659, |
| | | | | G3660, G3661, G3717, G3718, |
| | | | | G3841, G3843, G3844, G3845, |
| | | | | G3846, G3848, G3852, G3856, |
| | | | | G3857, G3858 |
| 831 | G3930 | DNA | Arabidopsis | Predicted polypeptide sequence is |
| | | | thaliana | paralogous to G225, G226, G1816, |
| | | | | G2718, G682; orthologous to G3392, |
| | | | | G3393, G3431, G3444, G3445, |
| | | | | G3446, G3447, G3448, G3449, |
| | | | | G3450 |
| 832 | G3930 | PRT | Arabidopsis | Paralogous to G225, G226, G1816, |
| | | | thaliana | G2718, G682; Orthologous to G3392, |
| | | | | G3393, G3431, G3444, G3445, |
| | | | | G3446, G3447, G3448, G3449, |
| | | | | G3450 |
| 833 | G4014 | DNA | Glycine max | Predicted polypeptide sequence is |
| | | | | orthologous to G1481, G900; para- |
| | | | | logous to G4015, G4016 |
| 834 | G4014 | PRT | Glycine max | Orthologous to G1481, G900; para- |
| | | | | logous to G4015, G4016 |
| 835 | G4015 | DNA | Glycine max | Predicted polypeptide sequence is |
| | | | | orthologous to G1481, G900; para- |
| | | | | logous to G4014, G4016 |
| 836 | G4015 | PRT | Glycine max | Orthologous to G1481, G900; para- |
| | | | | logous to G4014, G4016 |
| 837 | G4016 | DNA | Glycine max | Predicted polypeptide sequence is |
| | | | | orthologous to G1481, G900; para- |
| | | | | logous to G4014, G4015 |
| 838 | G4016 | PRT | Glycine max | Orthologous to G1481, G900; para- |
| | | | | logous to G4014, G4015 |

### Molecular Modeling

[0229] Another means that may be used to confirm the utility and function of transcription factor sequences that are orthologous or paralogous to presently disclosed transcription factors is through the use of molecular modeling software. Molecular modeling is routinely used to predict polypeptide structure, and a variety of protein structure modeling programs, such as “Insight II” (Accelrys, Inc.) are commercially available for this purpose. Modeling can thus be used to predict which residues of a polypeptide can be changed without altering function (U.S. Pat. No. 6,521,453). Thus, polypeptides that are sequentially similar can be shown to have a high likelihood of similar function by their structural similarity, which may, for example, be established by comparison of regions of superstructure. The relative tendencies of amino acids to form regions of superstructure (for example, helixes and β-sheets) are well established. For example, O'Neil et al. (1990) have discussed in detail the helix forming tendencies of amino acids. Tables of relative structure forming activity for amino acids can be used as substitution tables to predict which residues can be functionally substituted in a given region, for example, in DNA-binding domains of known transcription factors and equivalogs. Homologs that are likely to be functionally similar can then be identified.

[0230] Of particular interest is the structure of a transcription factor in the region of its conserved domain(s). Structural analyses may be performed by comparing the structure of the known transcription factor around its conserved domain with those of orthologs and paralogs. Analysis of a number of polypeptides within a transcription factor group or clade, including the functionally or sequentially similar polypeptides provided in the Sequence Listing, may also provide an understanding of structural elements required to regulate transcription within a given family.

### Methods for Increasing Plant Yield or Quality by Modifying Transcription Factor Expression

[0231] The present invention includes compositions and methods for increasing the yield and quality of a plant or its products, including those derived from a crop plant. These methods incorporate steps described in the Examples listed below, and may be achieved by inserting, in the 5′ to 3′ direction, a nucleic acid sequence of the invention into the genome of a plant cell: (i) a promoter that functions in the cell; and (ii) a nucleic acid sequence that is substantially identical to any of SEQ ID NO: 2N-1, where N=1 to 201 or 413 to 419, or SEQ ID NO: 403 to 824, where the promoter is operably linked to the nucleic acid sequence. A transformed plant may then be generated from the cell. One may either obtain seeds from that plant or its progeny, or propagate the transformed plant asexually. Alternatively, the transformed plant may be grow and harvested for plant products directly.

### EXAMPLES

[0232] It is to be understood that this invention is not limited to the particular devices, machines, materials and methods described. Although particular embodiments are described, equivalent embodiments may be used to practice the invention.

[0233] The invention, now being generally described, will be more readily understood by reference to the following examples, which are included merely for purposes of illustration of certain aspects and embodiments of the present invention and are not intended to limit the invention. It will be recognized by one of skill in the art that a transcription factor that is associated with a particular first trait may also be associated with at least one other, unrelated and inherent second trait which was not predicted by the first trait.

### Example I

### Isolation and Cloning of Full-Length Plant Transcription Factor cDNAs

[0234] Putative transcription factor sequences (genomic or ESTs) related to known transcription factors were identified in the Arabidopsis thaliana GenBank database using the tblastn sequence analysis program using default parameters and a P-value cutoff threshold of B4 or B5 or lower, depending on the length of the query sequence. Putative transcription factor sequence hits were then screened to identify those containing particular sequence strings. If the sequence hits contained such sequence strings, the sequences were confirmed as transcription factors.

[0235] Alternatively, Arabidopsis thaliana cDNA libraries derived from different tissues or treatments, or genomic libraries were screened to identify novel members of a transcription family using a low stringency hybridization approach. Probes were synthesized using gene specific primers in a standard PCR reaction (annealing temperature 60° C.) and labeled with ³²P dCTP using the High Prime DNA Labeling Kit (Roche Diagnostics Corp., Indianapolis, Ind.). Purified radiolabelled probes were added to filters immersed in Church hybridization medium (0.5 M NaPO₄ pH 7.0, 7% SDS, 1% w/v bovine serum albumin) and hybridized overnight at 60° C. with shaking. Filters were washed two times for 45 to 60 minutes with 1×SCC, 1% SDS at 60° C.

[0236] To identify additional sequence 5′ or 3′ of a partial cDNA sequence in a cDNA library, 5′ and 3′ rapid amplification of cDNA ends (RACE) was performed using the MARATHON cDNA amplification kit (Clontech, Palo Alto, Calif.). Generally, the method entailed first isolating poly(A) mRNA, performing first and second strand cDNA synthesis to generate double stranded cDNA, blunting cDNA ends, followed by ligation of the MARATHON Adaptor to the cDNA to form a library of adaptor-ligated ds cDNA.

[0237] Gene-specific primers were designed to be used along with adaptor specific primers for both 5′ and 3′ RACE reactions. Nested primers, rather than single primers, were used to increase PCR specificity. Using 5′ and 3′ RACE reactions, 5′ and 3′ RACE fragments were obtained, sequenced and cloned. The process can be repeated until 5′ and 3′ ends of the full-length gene were identified. Then the full-length cDNA was generated by PCR using primers specific to 5′ and 3′ ends of the gene by end-to-end PCR.

### Example II

### Strategy to Produce a Tomato Population Expressing all Transcription Factors Driven by Ten Promoters

[0238] Ten promoters were chosen to control the expression of transcription factors in tomato for the purpose of evaluating complex traits in fruit development. All ten are expressed in fruit tissues, although the temporal and spatial expression patterns in the fruit vary (Table 7). All of the promoters have been characterized in tomato using a LexA-GAL4 two-component activation system.

TABLE 7
Promoters used in the field study

| Promoter | General expression patterns | References |
|---|---|---|
| 35S (SEQ ID | Constitutive, high levels of | Odell et al (1985) |
| NO: 839) | expression in all throughout | |
| | the plant and fruit | |
| SHOOT MERI- | Expressed in meristematic | Long and Barton (1998) |
| STEMLESS | tissues, including apical | Long and Barton (2000) |
| (STM; SEQ ID | meristems, cambium. Low | |
| NO: 840) | levels of expression also | |
| | in some differentiating | |
| | tissues. In fruit, most | |
| | strongly expressed in vas- | |
| | cular tissues and endo- | |
| | sperm. | |
| ASYMMETRIC | Expressed predominately in | Byrne et al (2000) |
| LEAVES 1 | differentiating tissues. In | Ori et al. (2000) |
| (ASI; SEQ ID | fruit, most strongly ex- | |
| NO: 841) | pressed in vascular tissues | |
| | and in endosperm. | |
| LIPID TRANS- | In vegetative tissues, ex- | Thoma et al. (1994) |
| FER PROTEIN | pression is predominately in | |
| I (LTP1; SEQ | the epidermis. Low levels | |
| ID NO: 842) | of expression are also | |
| | evident in vascular tissue. | |
| | In the fruit, expression is | |
| | strongest in the pith-like | |
| | columella/placental tissue. | |
| RIBULOSE-1,5- | Expression predominately | Wanner and Gruissem |
| BISPHOSPHATE | in highly photosynthetic | (1991) |
| CARBOXY- | vegetative tissues. Fruit | |
| LASE, SMALL | expression predominately in | |
| SUBUNIT 3 | the pericarp. | |
| (RbcS-3; | | |
| SEQ ID NO: 843) | | |
| ROOT SYSTEM | Expression generally | Taylor and Scheuring |
| INDUCIBLE | limited to roots. Also | (1994) |
| I(RSI-1; SEQ | expressed in the vascular | |
| ID NO: 844) | tissues of the fruit. | |
| APETALA 1 | Light expression in leaves | Mandel et at. (1992a) |
| (AP1; SEQ ID | increases with maturation. | Hempel et al. (1997) |
| NO: 845) | Highest expression in | |
| | flower primordia and | |
| | flower organs. In fruits, | |
| | predominately in pith-like | |
| | columella/placental tissue. | |
| POLYGAL- | High expression throughout | Nicholass et al. (1995) |
| ACTURONASE | the fruit, comparable to | Montgomery et al. |
| (PG; SEQ ID | 35S. Strongest late in | (1993) |
| NO: 846) | fruit development. | |
| PHYTOENE | Moderate expression in | Corona et al. (1996) |
| DESATURASE | fruit tissues. | |
| (PD; SEQ ID | | |
| NO: 847) | | |
| CRUCIFERIN 1 | Expressed at low levels in | Breen and Crouch (1992) |
| (SEQ ID NO: | fruit vascular tissue and | Sjodahl et al. (1995) |
| 848) | columella. Seen and endo- | |
| | sperm expression. | |

[0239] Transgenic tomato lines expressing all Arabidopsis transcription factors driven by ten tissue and/or developmentally regulated promoters relied on the use of a two-component system similar to that developed by Guyer et al. (1998) that uses the DNA binding domain of the yeast GAL4 transcriptional activator fused to the activation domains of the maize C1 or the herpes simplex virus VP16 transcriptional activators, respectively. Modifications used either the E. coli lactose repressor DNA binding domain (LacI) or the E. coli LexA DNA binding domain fused to the GAL4 activation domain. The LexA-based system was the most reliable in activating tissue-specific GFP expression in tomato and was used to generate the tomato population. A diagram of the test transformation vectors is shown in FIG. 3.

[0240] The full set of 1700 Arabidopsis transcription factor genes replaced the GFP gene in the target vector and the set of nine regulated promoters replaced the 35S promoter in the activator plasmid. Both families of vectors were used to transform tomato to yield one set of 1700 transgenic lines harboring 1700 different target vector constructs of transcription factor genes and a second population harboring the five different activator vector constructs of promoter-LexA/GAL4 fusions. Transgenic plants harboring the activator vector constructs of promoter-LexA/GAL4 fusions were screened to identify plants with appropriate and high level expression of GUS. In addition, five of each of the 1700 transgenic plants harboring the target vector constructs of transcription factor genes were grown and crossed with a 35 S activator line. F1 progeny were assayed to ensure that the transgene was capable of being activated by the LexA/GAL4 activator protein. The best plants constitutively expressing transcription factors were selected for subsequent crossing to the ten transgenic activator lines. Several of these initial lines have been evaluated and preliminary results of seedling traits indicate that similar phenotypes observed in Arabidopsis are also observed in tomato when the same transcription factor is constitutively overexpressed. Thus, each parental line harboring either a promoter-LexA/GAL4 activator or an activatable Arabidopsis transcription factors gene were pre-selected based on a functional assessment. These parental lines were used in sexual crosses to generate 17,000 F1 (hemizygous for the activator and target genes) lines representing the complete set of Arabidopsis transcription factors under the regulation of 10 developmentally-regulated promoters. The transgenic tomato population will be grown in the field for evaluation over a period of three years. The full population will consist of three individual plants from each of the 17000 lines grown in the field in the 2003-2005 seasons. Approximately 1400 of these lines were grown and evaluated.

### Example III

### Test Constructs

[0241] For the LacI system, the test construct was made in two steps. First, two intermediate constructs were generated. The first contained the LacI protein and gal4 activation domain, and the second contained the LacI operator and GFP. In the first construct, four fragments were generated separately and fused by overlap extension PCR. The four fragments included:
[0242] the 35S minimal promoter (SEQ ID NO: 849) and omega translation enhancer (SEQ ID NO: 850) (from construct SLJ4D4, Jones et al. (1992));
[0243] the E. coli LacI gene in which the translation initiation site is changed to ATG from GTG plus a Y to H mutation at position 17 (Lehming et al (1987));
[0244] the gal4 transcription activation domain (amino acids 768-881, from pGAD424, Clontech);
[0245] the E9 polyadenylation site (Fluhr et al (1986)).

[0246] To make the second intermediate construct, two copies of the LacI binding site and the 35S minimal promoter (SEQ ID NO: 849) and omega enhancer (SEQ ID NO: 850) were fused with a gene coding for GFP by overlap extension PCR. The system in which the LexA protein was used as the DNA binding domain was constructed in a similar fashion. The LexA protein was cloned from plasmid pLexA (Clontech), and the tandem of eight LexA operators was from plasmid p8op-lacZ (Clontech).

[0247] Inserts from the above two intermediate constructs were cloned together into a plant transformation vector that contained antibiotic resistance (e.g., sulfonamide resistance) markers. A multiple cloning site was added upstream of the region encoding the LacI (LexA)/gal4 fusion protein to facilitate cloning of promoter fragments. In order to test the functionality of the system, full 35S promoters were cloned upstream of the region encoding the LacI (LexA)/gal4 fusion protein to give the structures shown in FIG. 3. These were then transformed into Arabidopsis. As expected, GFP expression was identical to that of 35S/GFP control.

[0248] The Two-Component Multiplication System vectors have an activator vector and a target vector. The LexA version of these is shown in FIG. 3. The LacI versions are identical except that LacI replaces LexA portions. Both LacI and LexA DNA binding regions were tested in otherwise identical vectors. These regions were made from portions of the test vectors described above, using standard cloning methods. They were cloned into a binary vector that had been previously tested in tomato transformations. These vectors were then introduced into Arabidopsis and tomato plants to verify their functionality. The LexA-based system was determined to be the most reliable in activating tissue-specific GFP expression in tomato and was used to generate the tomato population.

[0249] A useful feature of the PTF Tool Kit vectors described in FIG. 3 is the use of two different resistance markers, one in the activator vector and another in the target vector. This greatly facilitates identifying the activator and target plant transcription factor genes in plants following crosses. The presence of both the activator and target in the same plant can be confirmed by resistance to both markers. Additionally, plants homozygous for one or both genes can be identified by scoring the segregation ratios of resistant progeny. These resistance markers are useful for making the technology easier to use for the breeder.

[0250] Another useful feature of the PTF Tool Kit activator vector described in FIG. 3 is the use of a target GFP construct to characterize the expression pattern of each of the 10 activator promoters. The Activator vector contains a construct consisting of multiple copies of the LexA (or LacI) binding sites and a TATA box upstream of the gene encoding the green fluorescence protein (GFP). This GFP reporter construct verifies that the activator gene is functional and that the promoter has the desired expression pattern before extensive plant crossing and characterizations proceed. The GFP reporter gene is also useful in plants derived from crossing the activator and target parents because it provides an easy method to detect the pattern of expression of expressed plant transcription factor genes.

### Example IV

### Tomato Transformation and Sulfonamide Selection

[0251] After the activator and target vectors were constructed, the vectors were used to transform Agrobacterium tumefaciens cells. Since the target vector comprised a polypeptide or interest (in the example given in FIG. 3, the polypeptide of interest was green fluorescent protein; other polypeptides of interest may include transcription factor polypeptides of the invention), it was expected that plants containing both vectors would be conferred with improved and useful traits. Methods for generating transformed plants with expression vectors are well known in the art; this Example also describes a novel method for transforming tomato plants with a sulfonamide selection marker. In this Example, tomato cotyledon explants were transformed with Agrobacterium cultures comprising target vectors having a sulfonamide selection marker.

### Seed Sterilization

[0252] T63 seeds were surface sterilized in a sterilization solution of 20% bleach (containing 6% sodium hypochlorite) for 20 minutes with constant stirring. Two drops of Tween 20 were added to the sterilization solution as a wetting agent. Seeds were rinsed five times with sterile distilled water, blotted dry with sterile filter paper and transferred to Sigma P4928 phytacons (25 seeds per phytacon) containing 84 ml of MSO medium (the formula for MS medium may be found in Murashige and Skoog (1962) Plant Physiol. 15: 473-497; MSO is supplemented as indicated in Table 8).

### Seed Germination and Explanting

[0253] Phytacons were placed in a growth room at 24° C. with a 16 hour photoperiod. Seedlings were grown for seven days.

[0254] Explanting plates were prepared by placing a 9 cm Whatman No. 2 filter paper onto a plate of 100 mm×25 mm Petri dish containing 25 ml of R1F medium. Tomato seedlings were cut and placed into a 100 mm×25 mm Petri dish containing a 9 cm Whatman No. 2 filter paper and 3 ml of distilled water. Explants were prepared by cutting cotyledons into three pieces. The two proximal pieces were transferred onto the explanting plate, and the distal section was discarded. One hundred twenty explants were placed on each plate. A control plate was also prepared that was not subjected to the Agrobacterium transformation procedure. Explants were kept in the dark at 24° C. for 24 hours.

### Agrobacterium Culture Preparation and Cocultivation

[0255] The stock of Agrobacterium tumefaciens cells for transformation were made as described by Nagel et al. (1990) FEMS Microbiol Letts. 67: 325-328. Agrobacterium strain ABI was grown in 250 ml LB medium (Sigma) overnight at 281 C with shaking until an absorbance over 1 cm at 600 nm (A₆₀₀) of 0.5 B 1.0 was reached. Cells were harvested by centrifugation at 4,000×g for 15 minutes at 4 C. Cells were then resuspended in 250 μl chilled buffer (1 mM HEPES, pH adjusted to 7.0 with KOH). Cells were centrifuged again as described above and resuspended in 125 μl chilled buffer. Cells were then centrifuged and resuspended two more times in the same HEPES buffer as described above at a volume of 100 μl and 750 μl, respectively. Resuspended cells were then distributed into 40 μl aliquots, quickly frozen in liquid nitrogen, and stored at −80° C.

[0256] Agrobacterium cells were transformed with vectors prepared as described above following the protocol described by Nagel et al. (1990) supra. For each DNA construct to be transformed, 50 to 100 ng DNA (generally resuspended in 10 mM Tris-HCl, 1 mM EDTA, pH 8.0) were mixed with 40 μl of Agrobacterium cells. The DNA/cell mixture was then transferred to a chilled cuvette with a 2 mm electrode gap and subject to a 2.5 kV charge dissipated at 25 μF and 200 μF using a Gene Pulser II apparatus (Bio-Rad, Hercules, Calif.). After electroporation, cells were immediately resuspended in 1.0 ml LB and allowed to recover without antibiotic selection for 2 B 4 hours at 28° C. in a shaking incubator. After recovery, cells were plated onto selective medium of LB broth containing 100 μg/ml spectinomycin (Sigma) and incubated for 24-48 hours at 28° C. Single colonies were then picked and inoculated in fresh medium. The presence of the vector construct was verified by PCR amplification and sequence analysis.

[0257] Agrobacteria were cultured in two sequential overnight cultures. On day 1, the agrobacteria containing the target vectors having the sulfonamide selection vector (FIG. 3) were grown in 25 ml of liquid 523 medium (Moore et al. (1988) in Schaad, ed., Laboratory Guide for the Identification of Plant Pathogenic Bacteria. APS Press, St. Paul, Minn.) plus 100 mg spectinomycin, 50 mg kanamycin, and 25 mg chloramphenicol per liter. On day 2, five ml of the first overnight suspension were added to 25 ml of AB medium to which is added 100 mg spectinomycin, 50 mg kanamycin, and 25 mg chloramphenicol per liter. Cultures were grown at 28° C. with constant shaking on a gyratory shaker. The second overnight suspension was centrifuged in a 38 ml sterile Oakridge tubes for 5 minutes at 8000 rpm in a Beckman JA20 rotor. The pellet was resuspended in 10 ml of MSO liquid medium containing 600 μm acetosyringone (for each 20 ml of MSO medium, 40 μl of 0.3 M stock acetosyringone were added). The Agrobacterium concentration was adjusted to an A₆₀₀ of 0.25.

[0258] Seven milliliters of this Agrobacterium suspension were added to each of explanting plates. After 20 minutes, the Agrobacterium suspension was aspirated and the explants were blotted dry three times with sterile filter paper. The plates were sealed with Parafilm and incubated in the dark at 21° C. for 48 hours.

### Regeneration

[0259] Cocultivated explants were transferred after 48 hours in the dark to 100 mm×25 mm Petri plates (20 explants per plate) containing 25 ml of R1SB10 medium (this medium and subsequently used media contained sulfadiazine, the sulfonamide antibiotic used to select transformants). Plates were kept in the dark for 72 hours and then placed in low light. After 14 days, the explants were transferred to fresh RZ1/2SB25 medium. After an additional 14 days, the regenerating tissues at the edge of the explants were excised away from the primary explants and were transferred onto fresh RZ1/2SB25 medium. After another 14 day interval, regenerating tissues were again transferred to fresh ROSB25 medium. After this period, the regenerating tissues were subsequently rotated between ROSB25 and RZ1/2SB25 media at two week intervals. The well defined shoots that appeared were excised and transferred to ROSB100 medium for rooting.

### Shoot Analysis

[0260] Once shoots were rooted on ROSB100 medium, small leaf pieces from the rooted shoots were sampled and analyzed with a polymerase chain reaction procedure (PCR) for the presence of the SulA gene. The PCR-positive shoots (T0) were then grown to maturity in the greenhouses. Some T0 plants were crossed to plants containing the CaMV 35S activator vector. The T0 self pollinated seeds were saved for later crosses to different activator promoters.

TABLE 8
Media Compositions (amounts per liter)

| | MSO | | R1F | | R1SB10 | | RZ1/2SB25 | | ROSB25 | | ROSB100 | |
|---|---|---|---|---|---|---|---|---|---|---|---|---|
| Gibco MS Salts | 4.3 | g | 4.3 | g | 4.3 | g | 4.3 | g | 4.3 | g | 4.3 | g |
| RO Vitamins (100×) | 10 | ml | | | | | 5 | ml | 10 | ml | 10 | ml |
| R1 Vitamins (100×) | | | 10 | ml | 10 | ml | | | | | | |
| RZ Vitamins (100×) | | | | | | | 5 | ml | | | | |
| Glucose | 16.0 | g | 16.0 | g | 16.0 | g | 16.0 | g | 16.0 | g | 16.0 | g |
| Timentin ® | | | | | 100 | mg | | | | | | |
| Carbenicillin | | | | | | | 350 | mg | 350 | mg | 350 | mg |

| | | | | | | |
|---|---|---|---|---|---|---|
| Noble Agar | 8 | 11.5 | 10.3 | 10.45 | 10.45 | 10.45 |

| | | | | | | | | |
|---|---|---|---|---|---|---|---|---|
| MES | 0.6 | g | 0.6 | g | 0.6 | g | 0.6 | g |
| Sulfadiazine free acid | 1 | ml | 2.5 | ml | 2.5 | ml | 10 | ml |
| (10 mg/ml stock) | | | | | | | | |

| | | | | | | |
|---|---|---|---|---|---|---|
| pH | 5.7 | 5.7 | 5.7 | 5.7 | 5.7 | 5.7 |

TABLE 9
100× Vitamins (amounts per liter)

| | RO | | R1 | | RZ | |
|---|---|---|---|---|---|---|
| Nicotinic acid | 500 | mg | 500 | mg | 500 | mg |
| Thiamine HCl | 50 | mg | 50 | mg | 50 | mg |
| Pyridoxine HCl | 50 | mg | 50 | mg | 50 | mg |
| Myo-inositol | 20 | g | 20 | g | 20 | g |
| Glycine | 200 | mg | 200 | mg | 200 | mg |
| Zeatin | | | 0.65 | mg | 0.65 | mg |
| IAA | | | 1.0 | mg | | |

| | | | |
|---|---|---|---|
| pH | 5.7 | 5.7 | 5.7 |

TABLE 10
523 Medium (amounts per liter)

| | | |
|---|---|---|
| Sucrose | 10 | g |
| Casein Enzymatic Hydrolysate | 8 | g |
| Yeast Extract | 4 | g |
| K₂HPO₄ | 2 | g |
| MgSO₄•7H₂O | 0.3 | g |

| | |
|---|---|
| pH | 7.00 |

TABLE 11
AB Medium

| Part A | | | Part B(10× stock) | | |
|---|---|---|---|---|---|
| K₂HPO₄ | 3 | g | MgSO₄•7H₂O | 3 | g |
| NaH₂PO₄ | 1 | g | CaCl₂ | 0.1 | g |
| NH₄Cl | 1 | g | FeSO₄•7H₂O | 0.025 | g |
| KCl | 0.15 | g | Glucose | 50 | g |

| | | |
|---|---|---|
| pH | 7.00 | 7.00 |

| | | | | |
|---|---|---|---|---|
| Volume | 900 | ml | 1000 | ml |

Prepared by autoclaving and mixing 900 ml Part A with 100 ml Part B.

### Example V

### Population Characterization and Measurements

[0261] After the crosses were made (to generate plants having both activator and target vectors), general characterization of the F1 population was performed in the field. General evaluation included photographs of seedling and adult plant morphology, photographs of leaf shape, open flower morphology and of mature green and ripe fruit. Vegetative plant size was measured by ruler at approximately two months after transplant. Plant volume was obtained by the multiplication of the three dimensions. In addition, observations were made to determine fruit number per plant. Three red-ripe fruit were harvested from each individual plant when possible and were used for the lycopene and Brix assays. Two weeks later, six fruits per promoter::gene grouping were harvested, with two fruits per plant harvested when possible. The fruits were pooled and seeds collected.

[0262] Measurement of soluble solids (“Brix”) was used to determine the amount of sugar in solution. For example, 18 degree Brix sugar solution contains 18% sugar (w/w basis). Brix was measured using a refractometer (which measures refractive index). Brix measurements were performed by the follow protocol:
[0263] 1. Three red ripe fruit were harvest from each plant sampled.
[0264] 2. Each sample of three fruit was weighed together
[0265] 3. The three fruit were then quartered and blended together at high speed in a blender for approximately four minutes, until a fine puree was produced.
[0266] 4. Two 40 ml aliquots were decanted from the pureed sampled into 50 ml polypropylene tubes.
[0267] 5. Samples were then kept frozen at −20° C. until analysis
[0268] 6. For analysis samples were thawed in warm water.
[0269] 7. Approximately 15 ml of thawed tomato puree was filtered and placed onto the reading surface of a digital refractometer, and the reading recorded.

[0270] Source/sink activities. Source/sink activities were determined by screening for lines in which Arabidopsis transcription factors were driven by the RbcS-3 (leaf mesophyll expression), LTP1 (epidermis and vascular expression) and the PD (early fruit development) promoters. These promoters target source processes localized in photosynthetically active cells (RbcS-3), sink processes localized in developing fruit (PD) or transport processes active in vascular tissues (LTP1) that link source and sink activities. Leaf punches were collected within one hour of sunrise, in the seventh week after transplant, and stored in ethanol. The leaves were then stained with iodine, and plants with notably high or low levels of starch were noted.

[0271] Fruit ripening regulation. Screening for traits associated with fruit ripening focused on transgenic tomato lines in which Arabidopsis transcription factors are driven by the PD (early fruit development) and PG (fruit ripening) promoters. These promoters target fruit regulatory processes that lead to fruit maturation or which trigger ripening or components of the ripening process. In order to identify lines expressing transcription factors that impact ripening, fruits at 1 cm stage, a developmental time 7-10 days post anthesis and shortly after fruit set were tagged. Tagging occurred over a single two-day period per field trial at a time when plants are in the early fruiting stage to ensure tagging of one to two fruits per plant, and four to six fruits per line. Tagged fruit at the “breaker” stage on any given inspection were marked with a second colored and dated tag. Later inspections included monitoring of breaker-tagged fruit to identify any that have reached the full red ripe stage. To assess the regulation of components of the ripening process, fruit at the mature green and red ripe stage have been harvested and fruit texture analyzed by force necessary to compress equator of the fruit by 2 mm.

[0272] Post-harvest pathogen and other disease resistance. Screening for traits associated with post-harvest pathogen susceptibility and resistance focused on the lines in which Arabidopsis transcription factors are regulated by the fruit ripening promoter, PG. The PG promoter targets functions that are active in the later stages of ripening when the fruit are susceptible to necrotrophic pathogens. Mature green and red ripe fruit (two per line) were surface sterilized with 10% bleach and then wound inoculated with 10 ml droplets containing 10³ Botrytis cinerea or Alternaria alternata spores. A control site on each fruit was mock-inoculated with the water-0.05% Tween-80 solution used to suspend the spores. The titer of viable spores in the inoculating solution were determined by plating the samples on PDA plates. The inoculated fruit were held at 15° C. in humid storage boxes and lesion diameter measured daily. Resistance and susceptibility were scored as a percent of the spore-inoculated sites on each fruit that develop expanding necrotic lesions, and fruit from control non-transgenic lines were included.

### Example VI

### Screening CaMV 35S Activator Line Progeny with the Transcription Factor Target Lines to Identify Lines Expressing Plant Transcription Factors

[0273] The plant transcription factor target plants that were initially prepared lacked an activator gene to facilitate later crosses to various activator promoter lines. In order to find transformants that were adequately expressed in the presence of an activator, the plant transcription factor plants were crossed to the CaMV 35S promoter activator line and screened for transcription factor expression by RT-PCR. The mRNA was reverse transcribed into cDNA and the amount of product was measured by semi-quantitative PCR. The qualitative measurement was sufficient to distinguish high and low expressors.

[0274] Because the parental lines were each heterozygous for the transgenes, T1 hybrid progeny were sprayed with chlorsulfuron and cyanamide to find the 25% of the progeny containing both the activator (chlorsulfuron resistant) and target (cyanamide resistant) transgenes. Segregation ratios were measured and lines with abnormal ratios were discarded. Too high a ratio indicated multiple inserts, while too low a ratio indicated a variety of possible problems. The ideal inserts produced 50% resistant progeny. Progeny containing both inserts appeared at 25% because they also required the other herbicidal markers from the Activator parental line (50%×50%).

[0275] These T1 hybrid progeny were then screened in a 96 well format for plant transcription factor gene expression by RT-PCR to ensure expression of the target plant transcription factor gene, as certain chromosomal positions can be silent or very poorly expressed or the gene can be disrupted during the integration process. The 96 well format was also used for cDNA synthesis and PCR. This procedure involves the use of one primer in the transcribed portion of the vector and a second gene-specific primer.

[0276] Because both the activator and target genes are dominant in their effects, phenotypes were observable in hybrid progeny containing both genes. These TIPI plants were examined for visual phenotypes. However, more detailed analysis for increased color, high solids and disease resistance were also conducted once the best lines were identified and reproduced on a larger scale.

### Example VII

### Overexpression of Specific Promoter::Transcription Factor Combinations in Tomato Plants

[0277] Combined data obtained from the various promoter and gene combination in transformed tomato plants are shown in Table 12, with the minimum values, 25, 50 and 75 percentile values, and maximum values obtained for each of the three trait categories.

TABLE 12
Data ranges for fruit Brix, fruit lycopene, and two-month old vegetative
plant size measurements

| | | Percentile | | | | |
|---|---|---|---|---|---|---|
| | | Mm | 25% | 50% | 75% | Max |
| Brix (g | Trans- | 3.5 | 5.18 | 5.56 | 5.91 | 8.37 |
| sugar/100 g | formants | | | | | |
| sample) | Wild-type | 4.33 | 4.92 | 5.25 | 5.45 | 6.5 |
| Lycopene | Trans- | 19.62 | 48.11 | 63.02 | 79.87 | 152.55 |
| (ppm) | formants | | | | | |
| | Wild-type | 36.45 | 44.57 | 55.75 | 73.2 | 94.65 |
| Volume (m³) | Trans- | 0.0005 | 0.122 | 0.179 | 0.231 | 0.675 |
| | formants | | | | | |
| | Wild-type | 0.019 | 0.111 | 0.165 | 0.231 | 0.42 |

[0278] The data presented below for specific promoter::gene combinations in this Example include values with the highest significance for fruit Brix, fruit lycopene, or two-month old vegetative plant size measurements. Simple cutoff criteria were used to select these top “lead genes”—a gene and promoter combination rank in the top 95th percentile in any one measurement or if the same gene rank in the top 90th percentile under more than two promoters. The wild-type value at the 50% percentile in Table 12 was used as the control value for statistical purposes.

### G3 (SEQ ID NO: 1 and 2)

[0279] Published background information. G3 corresponds to RAP2.1, a gene first identified in a partial cDNA clone (Okamuro et al. (1997)). G3 is contained in BAC clone F2G19 (GenBank accession number AC083835; gene F2G19.32). Sakuma et al. (2002) categorized G3 into the A5 subgroup of the AP2 transcription factor family, with the A family related to the DREB and CBF genes. Fowler and Thomashow (2002) reported that G3 expression is enhanced in plants overexpressing CBF1, CBF2 or CBF3, and that the promoter region of G3 has two copies of the CCGAC core sequence of the CRT/DRE elements.

[0280] Discoveries in Arabidopsis. Overexpression of G3 under control of the 35S promoter produced very small plants with poor fertility. Overexpressors were also found to be sensitive to heat stress in a plate assay, exhibiting enhanced chlorosis following three days at 32° C. None of the stress challenge array background experiments revealed any regulation of G3 expression.

[0281] Discoveries in tomato. Lycopene content in fruit was greater than that in wild type controls, in plants expressing G3 under the RBCS3 promoter, with a rank in the 95th percentile among all measurements. In seedlings expressing G3 under the 35S promoter, size was reduced and an etiolated phenotype was evident. Plant size was also dramatically reduced upon overexpression of G3 with the 35S promoter in Arabidopsis.

TABLE 13
Data Summary for G3

| | Promoter summary: Avg. ± StD. (Count) | | |
|---|---|---|---|
| | Brix (g sugar/ | | |
| Promoter | 100 g sample) | Lycopene (ppm) | Volume (m³) |
| 35S | NA | NA | 0.18 ± 0.019 (3) |
| AP1 | 6.11 ± NA (1) | 93.77 ± NA (1) | 0.3 ± 0.046 (3) |
| Cruciferin | NA | NA | 0.11 ± NA (1) |
| RBCS3 | 4.88 ± NA (1) | 104.6 ± NA (1) | 0.25 ± 0.044 (3) |
| STM | 5.38 ± 0.367 (3) | 70.79 ± 29.746 (3) | 0.24 ± 0.044 (3) |

NA = not available
Avg. = average
StD. = standard deviation

### G22 (SEQ ID NO: 3 and 4)

[0282] Published background information. G22 has been identified in the sequence of BAC T13E15 (gene T13E15.5) by The Institute of Genomic Research (TIGR) as a “TINY transcription factor isolog”. Sakuma et al. (2002) categorized G22 into the B3 subgroup of the AP2 transcription factor family, with the B family containing ERF genes with a single AP2 domain.

[0283] Discoveries in Arabidopsis. Overexpression of G22 under control of the 35 S promoter produced plants with wild type morphology and development. Plants ectopically overexpressing G22 were slightly more tolerant to high NaCl containing media in a root growth assay compared to wild-type controls. G22 was found to be a stress-regulated gene in global transcript profiling experiments. Expression was repressed significantly in severe drought conditions, with expression repressed still during early recovery. In contrast, expression was significantly induced upon salt treatment, with induction increasing through eight hours. Treatments with cold and methyl jasmonate (MeJA) also induce expression.

[0284] Discoveries in tomato. Lycopene content in fruit was greater than that in wild type controls in plants expressing G22 under the RBCS3 promoter, with a rank in the 95th percentile among all measurements. Brix was higher than that in wild type in plants expressing G22 under the AP1 and STM promoters. Seedlings expressing G22 under the 35S promoter had curled leaves that were somewhat chlorotic.

[0285] Other related data. The paralogs of G22, G28 and G1006, were not tested in tomato in the present field study. In Arabidopsis, overexpression of G28, a G22 paralog, resulted in significant, multi-pathogen resistance in Arabidopsis.

TABLE 14
Data Summary for G22

| | Promoter summary: Avg. ± StD. (Count) | | |
|---|---|---|---|
| | Brix (g sugar/ | | |
| Promoter | 100 g sample) | Lycopene (ppm) | Volume (m³) |
| AP1 | 7.29 ± 1.534 (2) | 90.4 ± 28.242 (2) | 0.22 ± 0.045 (3) |
| LTP1 | NA | NA | 0.19 ± 0.057 (2) |
| PD | 5.89 ± 0.487 (3) | 96.17 ± 1.623 (3) | 0.23 ± 0.056 (3) |
| PG | 5.34 ± NA (1) | 44.77 ± NA (1) | 0.2 ± 0.019 (3) |
| RBCS3 | 5.38 ± NA (1) | 102.29 ± NA (1) | 0.22 ± 0.098 (2) |
| STM | 6.34 ± 0.272 (3) | 85.29 ± 31.415 (3) | 0.25 ± 0.165 (3) |

### G24 (SEQ ID NO: 5 and 6)

[0286] Published background information. G24 corresponds to gene At2g23340 (AAB87098). Sakuma et al. (2002) categorized G24 into the A5 subgroup of the AP2 transcription factor family, with the A family related to the DREB and CBF genes.

[0287] Discoveries in Arabidopsis. Overexpression of G24 and its closely related paralog G12 under control of the 35S promoter both produced very small plants with necrotic patches on cotyledons. In the most severe cases, necrosis developed rapidly following germination, and the entire seedling turned black and died prior to the formation of true leaves. In 35S::G24 seedlings with a weaker phenotype, necrotic patches were visible on the cotyledons, but the plants survived transplantation to soil. At later stages of development, necrotic patches were no longer apparent on the leaves, but the plants were usually small, slower growing and poorly fertile in comparison to wild type controls. The leaves of older 35S::G24 plants were also observed to become yellow and senesce prematurely compared to wild type. Expression of G24 was modulated during stress responses. Expression was repressed during drought and abscisic acid (ABA) treatments, but induced after 4-8 hours treatment with mannitol, cold and salt stresses. Overexpression of CBF4 also enhanced expression of G24. In contrast, G12 was induced in roots transiently by ABA and MeJA treatments.

[0288] Discoveries in tomato. In plants expressing G24 under the AS1 and Cruciferin promoters, plant size was significantly greater than wild type controls, with a rank in the 95th percentile among all measurements. Interestingly, seedlings overexpressing G12 and G24 under the control of the 35S promoter were smaller than wild type controls. No paralog of G24 was tested in the field trial. In Arabidopsis, overexpression of G24 and its paralog G12 under control of the 35S promoter suggested that G12 and G24 participate in ethylene-regulated programmed cell death, based on the development of necrotic patches on cotyledons.

[0289] Other related data. The paralogs of G24-G12, G1277, and G1379—were not tested in tomato in the present field trial. In Arabidopsis, the G12 knockout mutant seedlings germinated in the dark on ACC-containing media (ethylene insensitivity assay) were more severely stunted than the wild-type controls. These results might indicate that G12 is involved in the ethylene signal transduction or response pathway, a process in which other proteins of the AP2/EREBP family are in fact implicated. G12 knockout (KO) mutant plants were wild type in morphology and development, and in all other physiological and biochemical analyses that were performed.

[0290] Constitutive expression of G1277 in Arabidopsis caused morphological alterations, including a reduction in plant size and curled leaves. These phenotypes were more apparent in the T1 than the T2 generation. T2 plants were wild type in all physiological and biochemical assays performed.

[0291] Overexpression of G1379 in Arabidopsis was severely detrimental. 35S::G1379 plants were extremely small compared to wild type controls at all stages of development. The most strongly affected individuals senesced and died at the vegetative stage, whereas transformants with a weaker phenotype produced very short inflorescence stems. The flowers from these plants often had poorly developed petals and stamens and set very little seed. Due to the tiny nature and sterility of 35S::G1379 plants, physiological and biochemical assays could not be performed.

TABLE 15
Data Summary for G24

| | Promoter summary: Avg. ± StD. (Count) | | |
|---|---|---|---|
| | Brix (g sugar/ | | |
| Promoter | 100 g sample) | Lycopene (ppm) | Volume (m³) |
| AP1 | 5.5 ± 0.184 (2) | 56.06 ± 0.665 (2) | 0.09 ± 0.006 (3) |
| AS1 | 6.12 ± 0.667 (3) | 59.25 ± 13.098 (3) | 0.35 ± 0.095 (3) |
| Cruciferin | NA | NA | 0.4 ± 0.396 (2) |
| LTP1 | NA | NA | 0.12 ± NA (1) |
| PG | NA | NA | 0.18 ± 0.102 (3) |
| RBCS3 | 5.24 ± 0.255 (3) | 41.73 ± 2.181 (3) | 0.1 ± 0.006 (3) |
| STM | 5.69 ± 0.198 (2) | 45.75 ± 7.361 (2) | 0.09 ± 0.034 (3) |

### G47 (SEQ E) NO: 7 and 8)

[0292] Published background information. G47 corresponds to gene T22J18.2 (AAC25505). Sakuma et al. (2002) categorized G47 into the A5 subgroup of the AP2 transcription factor family, with the A family related to the DREB and CBF genes.

[0293] Discoveries in Arabidopsis. In seedlings expressing G47 under the 35S promoter, leaves had a brighter green color than wild types. Overexpression of G47 in Arabidopsis produced a substantial delay in flowering time and caused a marked change in shoot architecture. Interestingly, the inflorescences from these plants appeared thick and fleshy, had reduced apical dominance, and exhibited reduced internode elongation leading to a short compact stature. Stem sections from two lines were examined and found to be of wider diameter, and had large irregular vascular bundles containing a much greater number of xylem vessels than wild type. Furthermore some of the xylem vessels within the bundles appeared narrow and were possibly more lignified than were those of controls. G47 expression was significantly induced in roots by salt or cold stress treatments. Mannitol treatment produced a transient repression of expression. G47 overexpression in Arabidopsis has also been found to give enhanced drought tolerance.

[0294] Discoveries in tomato. Plant size was increased compared to that in wild type in G47 plants overexpressed under the LTP1 promoter. In seedlings expressing G47 under the 35S promoter, leaves had a brighter green color than wild types. Overexpression of G47 in Arabidopsis produced a substantial delay in flowering time and caused a marked change in shoot architecture. Interestingly, the inflorescences from these plants appeared thick and fleshy, had reduced apical dominance, and exhibited reduced internode elongation leading to a short compact stature. G47 stems had an increase in the number of xylem vessels, as well as increased lignin content.

[0295] Other related data. The paralog of G47, G2133, was not tested in tomato in the present field trial. In Arabidopsis, overexpression of G2133 caused a variety of alterations in plant growth and development: delayed flowering, altered inflorescence architecture, and a decrease in overall size and fertility.

TABLE 16
Data Summary for G47

| | Promoter summary: Avg. ± StD. (Count) | | |
|---|---|---|---|
| | Brix (g sugar/ | | |
| Promoter | 100 g sample) | Lycopene (ppm) | Volume (m³) |
| AP1 | 5.51 ± 0.099 (2) | 49.21 ± 7.227 (2) | 0.29 ± 0.089 (2) |
| AS1 | 5.44 ± 0.255 (2) | 37.47 ± 14.552 (2) | 0.29 ± 0.067 (3) |
| LTP1 | 5.36 ± 0.488 (2) | 74.18 ± 29.663 (2) | 0.43 ± 0.185 (3) |
| PD | 5.96 ± 0.396 (3) | 57.73 ± 23.02 (3) | 0.32 ± 0.044 (3) |
| RBCS3 | NA | NA | 0.3 NA (1) |

### G156 (SEQ ID NO: 9 and 10)

[0296] Published background information. G156 corresponds to AT5G23260 and was initially assigned the name AGL32 by Alvarez-Buylla et al. (2000) during a survey of the MAD box gene family. The gene has subsequently been identified as TRANSPARENT TESTA16 (TT16) by Nesi et al. (2002), who determined that the gene has a role in regulating proanthocynidin biosynthesis in the inner-most cell layer of the seed coat. Additionally, (TT16) controls cell shape of the innermost cell layer of the seed coat. TT16 is also referenced in the literature by an alternative name: ARABIDOPSIS BSISTER (ABS).

[0297] Discoveries in Arabidopsis. G156 was analyzed during our Arabidopsis genomics program via both 35S::G156 lines and KO.G156 lines. Overexpression of the gene produced a variety of abnormalities in plant morphology; a pleiotropic phenotype commonly observed when MADS box proteins are overexpressed. Nevertheless, the KO.G156 phenotype provided a clear indication that the gene had a role in regulation of pigment production, since the seeds from KO.G156 plants were pale. This conclusion was subsequently confirmed by Nesi et al. (2002). It is also noteworthy that 35S::G156 lines performed better than wild type in a C/N sensing assay. This phenotype is likely related to the function of the gene in the control of flavonoid biosynthesis.

[0298] RT-PCR experiments revealed high levels of G156 expression in Arabidopsis embryo and silique tissues, which correlates with the potential role of the gene in seed coat. G156 has not been noted as significantly differentially expressed in any of the microarray studies to date.

[0299] Discoveries in tomato. In transgenic tomatoes expressing G156 under the regulation of the AP1, promoter, fruit lycopene levels from AP1::G156 plants were markedly higher than those found in wild-type controls. AP1::G156 tomato plants were also noted to have a compact morphology.

[0300] Other related data. We have not yet identified a paralog of G156 in Arabidopsis. Interestingly, during genomics screens, an Arabidopsis T-DNA insertion mutant for G156 exhibited pale seeds reminiscent of a transparent testa phenotype, suggesting that the gene could be a regulator of pigment production. Such a role was subsequently confirmed by Nesi et al. (2002) who identified the gene as TRANSPARENT TESTA 16.

TABLE 17
Data Summary for G156

| | Promoter summary: Avg. ± StD. (Count) | | |
|---|---|---|---|
| | Brix (g sugar/ | | |
| Promoter | 100 g sample) | Lycopene (ppm) | Volume (m³) |
| AP1 | 6.05 ± NA (1) | 100.37 ± NA (1) | 0.14 ± 0.072 (3) |
| AS1 | 4.22 ± NA (1) | 58.47 ± NA (1) | 0.16 ± 0.069 (3) |
| Cruciferin | 5.39 ± 0.523 (2) | 75.72 ± 18.767 (2) | 0.29 ± 0.077 (3) |
| PD | 5.28 ± 0.049 (2) | 57.23 ± 8.761 (2) | 0.19 ± 0.008 (3) |
| PG | NA | NA | 0.2 ± 0.046 (3) |
| RBCS3 | 4.83 ± NA (1) | 71.95 ± NA (1) | 0.28 ± 0.113 (3) |
| STM | 4.84 ± NA (1) | 53.6 ± NA (1) | 0.27 ± 0.054 (3) |

### G159 (SEQ ID NO: 11 and 12)

[0301] Published background information: G159 corresponds to AT1G01530 and was assigned the name AGL28 by Alvarez-Buylla et al. (2000) during a survey of the MAD box gene family. G159 has a closely related paralog in the Arabidopsis genome, G165 (AT1G65360, AGL23).

[0302] Discoveries in Arabidopsis. G159 was analyzed during our Arabidopsis genomics program via 35S::G159 lines. Overexpression of the gene produced some abnormalities in plant growth and development (a pleiotropic phenotype commonly observed when MADS box proteins are overexpressed) but otherwise, no marked differences were observed compared to wild-type controls. A similar result was obtained from G165 overexpression in Arabidopsis.

[0303] RT-PCR experiments indicated that G159 and G165 were endogenously expressed at very low levels. Neither G159 nor G165 has been noted as significantly differentially expressed in any of the microarray studies performed to date.

[0304] Discoveries in tomato. Both fruit lycopene and soluble solid levels from LTP1::G159 fruits were markedly higher than those found in wild-type controls.

[0305] Other related data. The closely related paralog, G165, has not yet been analyzed in the tomato field trial. Overexpression of G165 in Arabidopsis produced a reduction in overall plant size.

TABLE 18
Data Summary for G159

| | Promoter summary: Avg. ± StD. (Count) | | |
|---|---|---|---|
| | Brix (g sugar/ | | |
| Promoter | 100 g sample) | Lycopene (ppm) | Volume (m³) |
| AP1 | NA | NA | 0.11 ± NA (1) |
| AS1 | 5.26 ± NA (1) | 57.29 ± NA (1) | 0.17 ± 0.042 (3) |
| Cruciferin | 5.41 ± 0.33 (3) | 48.91 ± 11.441 (3) | 0.25 ± 0.032 (3) |
| LTP1 | 6.41 ± NA (1) | 99.05 ± NA (1) | 0.2 ± 0.034 (3) |
| PD | 5.33 ± 0.127 (2) | 67.9 ± 35.56 (2) | 0.17 ± 0.024 (3) |
| PG | 5.74 ± 0.37 (3) | 69.73 ± 33.55 (3) | 0.25 ± 0.029 (3) |
| RBCS3 | 4.8 ± 0.071 (2) | 40.61 ± 7.658 (2) | 0.19 ± 0.017 (3) |
| STM | 5.43 ± 0.763 (3) | 46.37 ± 6.021 (3) | 0.21 ± 0.02 (3) |

### G187 (SEQ ID NO: 13 and 14)

[0306] Published background information. G187 corresponds to AtWRKY28 (At4g18170), for which there is no published literature beyond the general description of WRKY family members (Eulgem et al. (2000).

[0307] Discoveries in Arabidopsis. G187 is constitutively expressed. The function of G187 was analyzed using transgenic plants in which this gene was expressed under the control of the 35S promoter. G1187 T1 lines showed a variety of morphological alterations that included long and thin cotyledons at the seedling stage, and several flower abnormalities (for example, strap-like, sepaloid petals). These phenotypic alterations disappeared in the T2 generation, perhaps because of transgene silencing. Overexpression of G195, a G187 paralog, also produced similar deleterious effects. G187 overexpressing plants were indistinguishable from the corresponding wild-type controls in all the physiological and biochemical assays that were performed.

[0308] Discoveries in tomato. Transgenic tomatoes expressing G187 under the STM or RBCS3 promoter were analyzed for alteration in plant size, soluble solids and lycopene. The Brix levels under the STM promoter rank in the 95th percentile among all other measurements. Fruit-set in STM::G187 plants was delayed, and these plants did not produce mature fruit.

[0309] Other related data. G1198 is a paralog of G187 and was also tested in the field trial but no significant differences were detected in all assays performed. Several of the G187 paralogs were also overexpressed in Arabidopsis—some resulting in stunted plants while others had no phenotype.

TABLE 19
Data Summary for G187

| | Promoter summary: Avg. ± StD. (Count) | | |
|---|---|---|---|
| | Brix (g sugar/ | | |
| Promoter | 100 g sample) | Lycopene (ppm) | Volume (m³) |
| STM | 6.29 ± NA (1) | 55.21 ± NA (1) | 0.14 ± 0.04 (3) |

### G190 (SEQ ID NO: 15 and 16)

[0310] Published background information. G190 (At5g22570) corresponds to AtWRKY38 for which there is no published literature beyond the general description of WRKY family members (Eulgem et al. (2000).

[0311] Discoveries in Arabidopsis. The function of G190 was analyzed using transgenic plants in which this gene was expressed under the control of the 35S promoter. G190 overexpressing plants were morphologically wild type, and behaved like the corresponding controls in all physiological and biochemical assays that were performed. G190 was ubiquitously expressed, but at higher levels in roots and rosette leaves.

[0312] In a soil drought microarray experiment, G190 was found to be repressed in Arabidopsis leaves at multiple stages of drought stress. Repression levels correlated with the severity of drought, and expression began to recover after rewatering.

[0313] G190 was highly (up to 27-fold) induced by salicylic acid in both root and shoot tissue. Induction to a lesser extent was also observed with methyl jasmonate, sodium chloride and cold treatments.

[0314] Discoveries in tomato. The fruit lycopene levels of transgenic tomatoes expressing G190 under the STM promoter ranked in the 95th percentile among all lycopene measurements, and were higher than in any wild-type plant measured. Additionally, STM::G190 plants were noted to be larger and lower yielding, in terms of the number of fruit produced per plant, than wild type.

TABLE 20
Data Summary for G190

| | Promoter summary: Avg. ± StD. (Count) | | |
|---|---|---|---|
| | Brix (g sugar/ | | |
| Promoter | 100 g sample) | Lycopene (ppm) | Volume (m³) |
| 35S | 5.72 ± NA (1) | 72.2 ± NA (1) | 0.14 ± 0.047 (3) |
| AP1 | 6.01 ± NA (1) | 92.69 ± NA (1) | 0.15 ± 0.074 (3) |
| AS1 | 5.36 ± 0.206 (3) | 66.16 ± 14.14 (3) | 0.2 ± 0.034 (3) |
| RBCS3 | NA | NA | 0.16 ± 0.07 (3) |
| STM | 5.16 ± NA (1) | 98.31 ± NA (1) | 0.16 ± 0.088 (3) |

### G226 (SEQ ID NO: 17 and 18)

[0315] Published background information. G226 (At2g30420) was identified from the Arabidopsis BAC sequence AC002338, based on its sequence similarity within the conserved domain to other Myb family members in Arabidopsis.

[0316] Discoveries in Arabidopsis. Arabidopsis plants overexpressing G226 were more tolerant to low nitrogen and osmotic stress. They showed more root growth and more root hairs under conditions of nitrogen limitation compared to wild-type controls. Many plants were glabrous and also lacked anthocyanin production on stress conditions such as low nitrogen and high salt. In addition, one line showed higher amounts of seed protein, which could be a result of increased nitrogen uptake by these plants.

[0317] RT-PCR analysis of the endogenous levels of G226 indicated that the gene transcript was primarily found in leaf tissue. A cDNA array experiment supported this tissue distribution data by RT-PCR. G226 expression appeared to be repressed by soil drought treatment, as revealed by GeneChip microarray experiments. The gene itself was overexpressed 16-fold above wild type, however, very few changes in gene expression were observed. On the array, a chlorate/nitrate transporter was induced 2.7-fold over wild type, which could explain the low nitrogen tolerant phenotype of the plants and the increased amounts of seed protein in one of the lines. The same gene was spotted several times on the array and in all cases the gene showed induction, adding more validity to the data.

[0318] Discoveries in tomato. In transgenic tomatoes overexpressing G226 under the Cruciferin promoter, plant size was close to the highest wild type level and ranked in the 95th percentile among all size measurements.

[0319] Other related data: G226 paralogs include G1816, G225, G2718, and G682. Only G682 was tested in tomato in the tomato field trial, under the AP1, AS1, LTP1, RBCS3, and STM promoters. None of the promoters produced a positive hit in the three phenotypes discussed. Plants under the STM promoter were above average in size, but did not meet the 95th percentile cut off. Expressing G682 under the remaining promoters all resulted in plants that were smaller than average.

[0320] G682 and its paralogs have been studied extensively in Arabidopsis as part of the lead advancement drought program. During our earlier genomics program, members of the G682 clade were found to promote epidermal cell type alterations when overexpressed in Arabidopsis. These changes include both increased numbers of root hairs compared to wild type plants as well as a reduction in trichome number. In addition, overexpression lines for all members of the clade showed a reduction in anthocyanin accumulation in response to stress, enhanced tolerance to osmotic stress, and improved performance under nitrogen-limiting conditions. Information on gene function has been published for two of the genes in this clade, CAPRICE (CPC/G225) and TRYPTICHON (TRY/G1816). Mutations in CPC result in plants with very few root hairs and the overexpression of the gene causes an increase in the number of root hairs and a near trichome-less leaf phenotype, similar to results found by us (Wada (1997)). TRY has been shown to be involved in the lateral inhibition during epidermal cell specification in the leaf and root (Schellmann et al. (2002)). The model proposes that TRY (G11816) and CPC (G225) function as repressors of trichome and atrichoblast cell fate. TRY loss-of-function mutants form ectopic trichomes on the leaf surface. TRY gain-of-function mutants are glabrous and form ectopic root hairs.

[0321] Several orthologs were also tested in transgenic Arabidopsis. Plants overexpressing one of three soy orthologs (G3450, G3449, and G3448) were glabrous, had increased root hair density, and showed enhanced tolerance to low nitrogen. Overexpression of maize ortholog G3431 or rice ortholog G3393 gave a similar phenotype. Rice ortholog G3392 provided an even broader spectrum of stress tolerance in the plate-based assays.

TABLE 21
Data Sunmiary for G226

| | Promoter summary: Avg. ± StD. (Count) | | |
|---|---|---|---|
| | Brix (g sugar/ | | |
| Promoter | 100 g sample) | Lycopene (ppm) | Volume (m³) |
| Cruciferin | 6.14 ± 0.064 (2) | 57.12 ± 5.827 (2) | 0.32 ± 0.066 (3) |
| PG | NA | NA | 0.16 ± 0.08 (2) |

### G237 (SEQ ID NO: 19 and 20)

[0322] Published background information. G237 (At4g25560) was identified from the Arabidopsis BAC sequence, AL022197, based on sequence homology to the conserved region of other members of the Myb family. The Myb consortium has named this gene AtMYB18 (Kranz et al. (1998)). Reverse-Northern data suggest that this gene is expressed at a low level in cauline leaves and may be slightly induced by cold.

[0323] Discoveries in Arabidopsis. The function of G237 was analyzed through its ectopic overexpression in Arabidopsis. Arabidopsis plants overexpressing G237 were small compared to wild-type controls and they displayed a variety of developmental abnormalities, particularly with respect to flower development. They also showed more disease spread after infection with the biotrophic fungal pathogen Erysiphe orontii compared to control plants. The transgenic plants did not have altered susceptibility to the necrotrophic fungal pathogen Fusarium oxysporum or the bacterial pathogen Pseudomonas syringae. RT-PCR analysis of endogenous levels of G237 only detected G237 transcript in root tissue. There was no induction of G237 transcript in leaf tissue in response to environmental stress treatments, based on RT-PCR and microarray analysis.

[0324] Discoveries in tomato. The fruit lycopene levels in transgenic tomatoes overexpressing G237 under the PD and PG promoter were higher than the highest wild type level and ranked in the 95th percentile among all lycopene measurements. Plant size under all promoters tested was smaller than average. Arabidopsis plants overexpressing G237 were small compared to wild-type controls and they displayed a variety of developmental abnormalities. They also showed more disease spread after infection with the biotrophic fungal pathogen Erysiphe orontii compared to control plants.

[0325] Other related data. G237 paralog G1309 was tested in transgenic tomatoes in the present field trial. Only volume measurements are available, and ectopic expression of G1309 did not result in a significant effect on plant size. In Arabidopsis, primary transformants of G1309 generally had smaller rosettes and shorter petioles than control plants in two plantings. However, this phenotype did not appear in the T2 generation. One line also showed a reproducible increase in mannose in leaves when compared with wild type. G237 was originally reported to have an increased percentage of arabinose and mannose but this did not repeat.

TABLE 22
Data Summary for G237

| | Promoter summary: Avg. ± StD. (Count) | | |
|---|---|---|---|
| | Brix (g sugar/ | | |
| Promoter | 100 g sample) | Lycopene (ppm) | Volume (m³) |
| 35S | 4.69 ± NA (1) | 36.31 ± NA (1) | 0.07 ± 0.01 (3) |
| AP1 | 5.53 ± 1.223 (2) | 72.33 ± 50.82 (2) | 0.07 ± 0.019 (3) |
| AS1 | 5.71 ± 0.113 (2) | 63.55 ± 33.969 (2) | 0.07 ± 0.044 (3) |
| Cruciferin | 5.1 ± NA (1) | 65.87 ± NA (1) | 0.1 ± 0.045 (3) |
| PD | 5.94 ± NA (1) | 106.1 ± NA (1) | 0.11 ± NA (1) |
| PG | 5.53 ± 0.157 (3) | 98.4 ± 22.843 (3) | 0.08 ± 0.007 (3) |
| STM | 5.65 ± 0.078 (2) | 69.31 ± 47.779 (2) | 0.09 ± 0.021 (3) |

### G270 (SEQ ID NO: 21 and 22)

[0326] Published background information. The sequence of G270 (At5g66055) was initially obtained from the Arabidopsis sequencing project, GenBank accession number AB01474.1 (GI:2924651). G1270 has no distinctive features other than the presence of a 33-amino acid repeated ankyrin element known for protein-protein interaction, in the C-terminus of the predicted protein. Amino acid sequence comparison shows similarity to Arabidopsis NPR1.

[0327] Discoveries in Arabidopsis. The analysis of the endogenous level of G270 transcripts by RT-PCR revealed constitutive expression in all tissues and biotic/abiotic treatments examined. Microarray analysis revealed a significant (p-value<0.01) reduction in G270 expression level in shoots of ABA treated plants (4 hr, 8 hr and 24 hr time points). The function of G270 was analyzed by ectopic overexpression in Arabidopsis. The characterization of G270 transgenic lines revealed no significant morphological, physiological or biochemical changes when compared to wild-type controls.

[0328] Discoveries in tomato. Transgenic tomatoes expressing G270 under the meristem (AS1) promoter were larger than wild type controls; ranking in the 95th percentile among all size measurements. In addition, morphological examination revealed that transgenic AS1-G270 tomato plants produced, in average, more green fruits than wild-type control plants. Under the cruciferin promoter, G270 expression resulted in larger fruits. 35S::G270 Arabidopsis plants were morphologically indistinguishable from wild-type plants. Those observations indicate that G270 may be an important regulator of plant biomass with a positive impact on overall fruit yield.

[0329] Other related data. The paralog of G270, G1280, was not tested in tomato in the present field trial. Similar to G270, transgenic 35S::G1280 Arabidopsis plants were indistinguishable from wild type controls.

TABLE 23
Data Summary for G270

| | Promoter summary: Avg. ± StD. (Count) | | |
|---|---|---|---|
| | Brix (g sugar/ | | |
| Promoter | 100 g sample) | Lycopene (ppm) | Volume (m³) |
| 35S | 5.67 ± NA (1) | 50.89 ± NA (1) | 0.18 ± 0.012 (3) |
| AP1 | NA | NA | 0.13 ± 0.029 (2) |
| AS1 | 4.96 ± 0.071 (2) | 37.92 ± 0.035 (2) | 0.34 ± 0.12 (2) |
| Cruciferin | 4.89 ± 0.247 (2) | 43.41 ± 16.461 (2) | 0.3 ± 0.112 (3) |
| PD | 5.61 ± NA (1) | 46.85 ± NA (1) | 0.25 ± 0.156 (3) |
| PG | 5.02 ± NA (1) | 25.37 ± NA (1) | 0.26 ± 0.028 (3) |
| RBCS3 | 5.59 ± NA(1) | 46.9 ± NA (1) | 0.21 ± 0.013 (2) |

### G328 (SEQ ID NO: 23 and 24)

[0330] Published background information. G328 was identified as COL-1 (CONSTANS LIKE-1, accession number Y10555) (1), and is a close homologue of the flowering time gene CONSTANS(CO). Both genes were found to form a tandem repeat on chromosome 5.

[0331] Ledger et al. (2001) showed that the circadian clock regulates expression of COL1 with a peak in transcript levels around dawn. Altered expression of COL1 in transgenic plants had little effect on flowering time. Analysis of circadian phenotypes in transgenic plants showed that over-expression of COL1 can shorten the period of two distinct circadian rhythms. Experiments with the highest COL1 over-expressing line indicate that its circadian defects are fluence rate-dependent, suggesting an effect on a light input pathway(s).

[0332] Discoveries in Arabidopsis. The function of this gene was analyzed using transgenic plants in which G328 was expressed under the control of the 35S promoter. The phenotype of these transgenic plants was wild type in all assays performed. Expression profiling assays using RT/PCR showed that the expression levels of G328 were slightly reduced in response to treatments with ABA, salt, drought and infection with Erysiphe. Microarray experiments indicate that G328 was induced by drought, cold, NaCl, mannitol, ABA, salicylic acid (SA), G481 overexpression, and G912 overexpression.

[0333] Discoveries in tomato. The fruit lycopene level under the LTP1 and STM promoters were above the highest wild type levels and ranked in the 95th percentile among all measurements.

[0334] Other related data. The paralogs of G328, G2436 and G2443, were not tested in tomato in the present field trial. No significant changes in lycopene, plant size, or Brix was detected in either LTP1::G1917 or STM::G1917 plants. Neither G2436 nor G2443 was analyzed in Arabidopsis.

TABLE 24
Data Summary for G328

| | Promoter summary: Avg. ± StD. (Count) | | |
|---|---|---|---|
| | Brix (g sugar/ | | |
| Promoter | 100 g sample) | Lycopene (ppm) | Volume (m³) |
| AP1 | 5.65 ± NA (1) | 114.15 ± NA (1) | 0.21 ± 0.063 (2) |
| PG | 6.01 ± NA (1) | 102.46 ± NA (1) | 0.21 ± 0.02 (3) |
| RBCS3 | 5.65 ± 0.792 (3) | 71.77 ± 15.838 (3) | 0.2 ± 0.084 (3) |
| STM | 5.62 ± NA (1) | 65.16 ± NA (1) | 0.16 ± 0.023 (3) |

### G363 (SEQ ID NO: 25 and 26)

[0335] Published background information. G363 corresponds to ZFP4 (Tague and Goodman, 1995). ZPF4 was reported to be a member of a gene family with high expression in roots. A reduced level of expression was detected in stems. No other public information is available concerning the function of this gene.

[0336] Discoveries in Arabidopsis. As determined by RT-PCR, G363 was highly expressed in leaves, roots and shoots, and at lower levels in the other tissues tested. No expression of G363 was detected in the other tissues tested. The high expression detected in leaves is contrary to the lack of expression reported by Tague and Goodman (1995). G363 expression was also slightly induced in rosette leaves by auxin, ABA and cold treatments. Overexpression of G363 resulted in many primer transformants that were smaller than controls. Otherwise, all observed phenotypes in all assays were wild type.

[0337] G363 expression was induced by drought, ABA, SA, G1073 overexpression, G481 overexpression, G682 overexpression, and G912 overexpression.

[0338] Discoveries in tomato. The fruit lycopene level in transgenic tomato plants overexpressing G363 under the regulatory control of the LTP1 promoter was above the highest wild type levels and ranked in the 95th percentile among all measurements.

TABLE 25
Data Summary for G363

| | Promoter summary: Avg. ± StD. (Count) | | |
|---|---|---|---|
| | Brix (g sugar/ | | |
| Promoter | 100 g sample) | Lycopene (ppm) | Volume (m³) |
| LTP1 | 5 ± NA (1) | 105.08 ± NA (1) | 0.2 ± 0.039 (3) |

### G383 (SEQ ID NO: 27 and 28)

[0339] Published background information. G383 was identified as a gene in the sequence of chromosome 4, contig fragment No. 85 (Accession number AL161589), released by the European Union Arabidopsis sequencing project. No published information is available regarding the function(s) of G383.

[0340] Discoveries in Arabidopsis. The sequence of G383 was experimentally determined and the function of G383 was analyzed using transgenic plants in which G383 was expressed under the control of the 35S promoter. In roughly 50% of the T1 seedlings, increased amounts of anthocyanin in petioles and apical meristems was observed. However, this might be due to transplanting as this effect was not observed in the T2 seedlings. In all other morphological, physiological, or biochemical assays, plants overexpressing G383 appeared to be identical to controls.

[0341] G383 was expressed at low levels in flowers, rosette leaves, embryos and siliques by RT-PCR. No change in the expression of G383 was detected in response to the environmental stress-related conditions tested using RT-PCR. Microarray experiments indicated that G383 is induced by cold.

[0342] Discoveries in tomato. The fruit lycopene level in transgenic tomato plants overexpressing G383 under the regulatory control of the STM promoter was above the highest wild type levels and ranked in the 95th percentile among all measurements.

[0343] Other related data. A paralog of G383, G1917, tested in tomato in the present field trial. No significant changes in lycopene, plant size, or Brix was detected in either LTP1::G1917 or STM::G1917 plants. The function of G1917 was studied in Arabidopsis by knockout analysis. Plants homozygous for a T-DNA insertion in G1917 showed a significant increase in peak M39489 in the seed glucosinolate assay.

TABLE 26
Data Summary for G383

| | Promoter summary: Avg. ± StD. (Count) | | |
|---|---|---|---|
| | Brix (g sugar/ | | |
| Promoter | 100 g sample) | Lycopene (ppm) | Volume (m³) |
| 35S | 5.59 ± 0.764 (2) | 49.45 ± 5.197 (2) | 0.21 ± 0.073 (3) |
| LTP1 | 5.12 ± 1.103 (2) | 53.03 ± 0.792 (2) | 0.27 ± 0.044 (3) |
| PG | 6.12 ± 0.17 (2) | 84.78 ± 6.866 (2) | 0.3 ± 0.058 (3) |
| RBCS3 | 5.54 ± 0.112 (3) | 59.37 ± 9.826 (3) | 0.3 ± 0.035 (3) |
| STM | 5.76 ± 0.559 (2) | 99.38 ± 8.111 (2) | 0.27 ± 0.022 (3) |

### G435 (SEQ ID NO: 29 and 30)

[0344] Published background information. G435 corresponds to AT5G53980 and encodes a HD-ZIP class I HD protein.

[0345] Discoveries in Arabidopsis. Overexpression of G435 produced some alterations in morphology such as reduced size, delayed bolting, and altered seed shape. 35S::G435 Arabidopsis lines were also more shade tolerant in a screen under conditions deficient in red light.

[0346] RT-PCR experiments revealed that G435 is expressed in a wide range of Arabidopsis tissue types. Microarray experiments have subsequently revealed that expression of G435 is stress responsive. The gene was up-regulated in response to ACC, drought, mannitol, and salt and was repressed in response to cold treatments.

[0347] Discoveries in tomato. Lycopene levels in RBCS3::G435 fruits were markedly higher than those found in wild-type fruit.

TABLE 27
Data Summary for G435

| | Promoter summary: Avg. ± StD. (Count) | | |
|---|---|---|---|
| | Brix (g sugar/ | | |
| Promoter | 100 g sample) | Lycopene (ppm) | Volume (m³) |
| 35S | 5.55 ± 1.061 (2) | 63.11 ± 52.114 (2) | 0.15 ± 0.009 (3) |
| AP1 | 5.78 ± 0.227 (3) | 76.16 ± 12.648 (3) | 0.21 ± 0.039 (3) |
| AS1 | 5.56 ± 0.028 (2) | 72.47 ± 10.472 (2) | 0.16 ± 0.051 (3) |
| LTP1 | NA | NA | 0.27 ± 0.036 (3) |
| PG | 5.31 ± 0.721 (2) | 57.58 ± 5.918 (2) | 0.29 ± 0.209 (3) |
| RBCS3 | 6.05 ± NA (1) | 99.77 ± NA (1) | 0.18 ± 0.025 (3) |
| STM | 5.31 ± 0.834 (2) | 81.19 ± 7.022 (2) | 0.16 ± 0.014 (3) |

### G450 (SEQ ID NO: 31 and 32)

[0348] Published background information. G450 is IAA14, a member of the Aux/IAA class of small, short-lived nuclear proteins. Aux/IAA proteins function through heterodimerization with ARF transcriptional regulators, as well as homo- and heterodimerization with other IAA proteins. Most Aux/IAA proteins are thought to be negative regulators of ARF proteins, and are degraded in response to auxin. A gain-of-function mutant in IAA14, slr (solitary root), was found to abolish lateral root formation, reduce root hair formation, and impair gravitropic responses (Fukaki et al. (2002)).

[0349] Discoveries in Arabidopsis. Overexpression of G450 influenced leaf development, overall plant stature, and seed size, Some lines of 35S::G450 plants were slightly small and their leaves were often curled and twisted. Larger seeds were reported for two T2 lines; this phenotype could be related to lower fertility. 35S::G450 plants were wild type in all physiological and biochemical assays. Overexpression of G450 did not phenocopy the gain-of-function mutation sir. This is consistent with results obtained with other IAA family members such as axr3 (G448) and shy2 (G449).

[0350] Discoveries in tomato. Plants expressing G450 under the STM promoter scored in the 95th percentile for fruit lycopene and Brix.

[0351] Other related data. G448, G455 and G456 are G450 paralogs. None of these genes have been tested in field trials yet. The paralogs all produced either no phenotypic alterations in Arabidopsis, or only minor morphological alterations.

TABLE 28
Data Summary for G450

| | Promoter summary: Avg. ± StD. (Count) | | |
|---|---|---|---|
| | Brix (g sugar/ | | |
| Promoter | 100 g sample) | Lycopene (ppm) | Volume (m³) |
| 35S | NA | NA | 0.16 ± 0.016(3) |
| AP1 | 5.96 ± NA (1) | 87.02 ± NA (1) | 0.2 ± 0.075 (3) |
| AS1 | 4.52 ± NA (1) | 41.2 ± NA (1) | 0.16 ± 0.063 (3) |
| LTP1 | 5.52 ± NA (1) | 41.7 ± NA (1) | 0.2 ± 0.052 (3) |
| PD | NA | NA | 0.17 ± 0.091 (3) |
| RBCS3 | NA | NA | 0.21 ± 0.039 (3) |
| STM | 6.28 ± NA (1) | 109.97 ± NA (1) | 0.16 ± 0.037 (3) |

### G522 (SEQ ID NO: 33 and 34)

[0352] Published background information. G522 was first identified in the sequence of the BAC clone F23E13, GenBank accession number AL022141, released by the Arabidopsis Genome initiative. It also corresponds to the AGI locus of AT4G36160. A comprehensive analysis of NAC family transcription factors was recently published by Ooka et al. (2003) where G522 was identified as ANAC076.

[0353] Discoveries in Arabidopsis. The function of G522 was analyzed using transgenic plants in which G522 was expressed under the control of the 35S promoter. The phenotype of these transgenic plants was wild-type in all assays performed. RT-PCR analysis was used to determine the endogenous levels of G522 in a variety of issues and under a variety of environmental stress-related conditions. G522 is primarily expressed in flowers and at low levels in shoots and roots. RT-PCR data also indicates an induction of G522 transcript accumulation upon auxin treatment.

[0354] Discoveries in tomato. Transgenic tomatoes expressing G522 under the regulation of both 35S and AP1 promoters showed a significant increase in soluble solids levels.

[0355] Other related data. Putative paralogs of G522 have been identified by us. These consist of: G1354, G1355, G1453, G1766, G2534 and G761. The most closely related paralog (G1355) exhibited a decrease in seed oil in one line and no obvious effects on growth and development. However all other paralogs, when overexpressed in Arabidopsis exhibited gross to mild alteration in growth and development.

TABLE 29
Data Summary for G522

| | Promoter summary: Avg. ± StD. (Count) | | |
|---|---|---|---|
| | Brix (g sugar/ | | |
| Promoter | 100 g sample) | Lycopene (ppm) | Volume (m³) |
| 35S | 6.8 ± NA (1) | 35.69 ± NA (1) | 0.06 ± 0.001 (2) |
| AP1 | 6.41 ± NA (1) | 56.55 ± NA (1) | 0.1 ± 0.037 (3) |
| AS1 | NA | NA | 0.06 ± 0.012 (3) |
| PG | 5.76 ± NA (1) | 56.42 ± NA (1) | 0.08 ± 0.018 (3) |
| RBCS3 | NA | NA | 0.04 ± 0.013 (3) |
| STM | 6.1 ± NA (1) | 72.33 ± NA (1) | 0.06 ± 0.027 (2) |

### G551 (SEQ ID NO: 35 and 36)

[0356] Published background information. G551 corresponds to AT5G03790 and encodes a HD-ZIP class I HD protein.

[0357] Discoveries in Arabidopsis. G551 was analyzed during our Arabidopsis genomics program. The function of G551 was assessed by analysis of transgenic Arabidopsis lines in which the cDNA was constitutively expressed from the 35S CaMV promoter. Overexpression of G551 produced a range of effects on morphology, including changes in leaf and cotyledon shape, coloration, and a reduction in overall plant size, and fertility. However, these phenotypes were somewhat variable between different transformants. In particular, the most severely affected lines were very small, dark green, in some cases had serrated leaves, and in some cases flowered early.

[0358] RT-PCR experiments revealed that G551 is expressed at moderately high levels in a range of tissue types. However, G551 has not been found to be significantly differentially expressed in any of the conditions examined in microarray studies performed to date.

[0359] Discoveries in tomato. Transgenic tomatoes expressing G551 under the regulation of each of the 35S, AP1, Cruciferin, LTP1, RBCS3, and STM promoters were analyzed for alterations in plant size, soluble solids and lycopene. Soluble solid levels in STM::G551 fruits were markedly higher than those found in wild-type controls.

TABLE 30
Data Summary for G551

| | Promoter summary: Avg. ± StD. (Count) | | |
|---|---|---|---|
| | Brix (g sugar/ | | |
| Promoter | 100 g sample) | Lycopene (ppm) | Volume (m³) |
| 35S | NA | NA | 0.18 ± 0.026 (3) |
| AP1 | NA | NA | 0.07 ± 0.042 (2) |
| Cruciferin | 5.54 ± NA (1) | 30.11 ± NA (1) | 0.1 ± 0.092 (3) |
| LTP1 | 5.8 ± NA (1) | 69.57 ± NA (1) | 0.1 ± 0.01 (3) |
| RBCS3 | 5.36 ± 0.262 (2) | 55.22 ± 3.083 (2) | 0.14 ± 0.008 (2) |
| STM | 6.58 ± NA (1) | 60.31 ± NA (1) | 0.08 ± 0.026 (3) |

### G558 (SEQ ID NO: 37 and 38)

[0360] Published background information. G558 is the Arabidopsis transcription factor TGA2 (de Pater S, et al, 1996) or AHBP-1b (Kawata T, et al. 1992). TGA2 was shown by the two hybrid system to interact with NPR1—a key component of the SA-regulated pathogenesis-related gene expression and disease resistance pathways in plants (Zhang Y, et al 1999). Furthermore, gel shift analysis showed TGA2 can bind to the PR1 promoter (Zhang Y, et al 1999). In vitro, binding activity of TGA2 can be abolished by a dominant negative mutant of TGA1a from tobacco (Miao Z H, et al 1995) and it is constitutively expressed in roots, shoots, leaves and flowers, and expressed at lower levels in siliques (de Pater S, et al, 1996).

[0361] Discoveries in Arabidopsis. Determination of endogenous levels of G558 by RT-PCR indicates that this gene is expressed in all tissues tested. G558 is significantly repressed in cold and salt stress and marginally induced by Erysiphe and salicylic acid. G558 overexpressing lines were subject to gene expression profiling experiments using a 7000 element cDNA array. These experiments showed that G558 is highly overexpressed (at least 15-fold) in rosette leaves of overexpressing plants, and that several known genes are induced. These genes encode: GST, phospholipase D, PGP224 (also strongly induced by Erysiphe), PR1, berberine bridge enzyme (the bridge enzyme of antimicrobial benzophenanthridine alkaloid biosynthesis which is methyl jasmonate-inducible), polygalacturonase, WAK 1 PGP224 (also strongly induced by Erysiphe), pathogen-inducible protein CXc750, tryptophan synthase, tyrosine transaminase and an antifungal protein. Almost all of the top induced genes in G558 overexpressing lines are related to disease, and most of these have been shown to be induced or repressed in response to Erysiphe or Fusarium infection. Thus genes involved in the defense response appeared to be induced in plants overexpressing G558 T2 plants expressing G558 were noted as having poor fertility and were slightly earlier flowering in comparison to wild type. Published data demonstrate that G558 interacts with NPR1 (3). We have shown that G558 was marginally inducible with Erysiphe and salicylic acid and that when G558 was overexpressed, genes involved in the defense response appeared to be induced. These data indicate that G558 is an important component of the defense response. However, overexpression of G558 does not appear to cause plants to be more resistant to disease, suggesting that its expression alone is not sufficient to mount a full defense response. G558 is also repressed by cold treatment, raising the possibility that G558 may be responsible for making Arabidopsis more susceptible to some pathogens at lower temperatures.

[0362] Discoveries in tomato. The respective fruit lycopene level under the AS1 promoter and Brix level under the STM promoter were close to the highest wild type levels and ranked in the 95th percentile among all measurements. Under the AP1 promoter, plant size is also significantly more than the wild type controls. Its paralog G1198 was also tested in a field trial but no significant differences were detected in all assays performed. Several of its paralogs were also overexpressed in Arabidopsis—some resulting in stunted plants while others having no phenotype.

[0363] Other related data. G558 paralogs include G1198 G1806 G554 G555 G556 G578 and G629. Only G1198 was tested in tomato in the field trial. No significant differences were detected in all assays performed with G1198 in tomato. In Arabidopsis, overexpression of G1198 and G1806 was deleterious and overexpression of G578 was lethal. In contrast, overexpression of G554, G555, G556 and G629 did not result in any observable

TABLE 31
Data Summary for G558

| | Promoter summary: Avg. ± StD. (Count) | | |
|---|---|---|---|
| | Brix (g sugar/ | | |
| Promoter | 100 g sample) | Lycopene (ppm) | Volume (m³) |
| 35S | 4.76 ± NA (1) | 43.48 ± NA (1) | 0.28 ± 0.075 (3) |
| AP1 | 6.18 ± 0.189 (3) | 75.2 ± 22.272 (3) | 0.32 ± 0.056 (3) |
| AS1 | 6.31 ± NA (1) | 98.75 ± NA (1) | 0.2 ± 0.104 (3) |
| STM | 6.39 ± 0.417 (2) | 92.88 ± 3.479 (2) | 0.17 ± 0.042 (2) |

### G567 (SEQ ID NO: 39 and 40)

[0364] Published background information. G567 was discovered as a bZIP gene in BAC T10P11, accession number AC002330, released by the Arabidopsis genome initiative. There is no published information regarding the function of G567.

[0365] Discoveries in Arabidopsis. The annotation of G567 in BAC AC002330 was experimentally confirmed and the function of G567 was analyzed using transgenic plants in which G567 was expressed under the control of the 35S promoter. Seedlings overexpressing G567 had slowly opening cotyledons and very short roots when grown on MS plates containing glucose. These plants were otherwise wild type. G567 could be involved in sugar sensing or metabolism during germination. G567 appeared to be constitutively expressed, and induced in leaves in a variety of conditions.

[0366] Discoveries in tomato. The fruit Brix level under the AP1 promoter was close to the highest wild type level and ranked above the 95th percentile among all Brix measurements. Arabidopsis seedlings overexpressing G567 had slowly opening cotyledons and very short roots when grown on MS plates containing glucose but were otherwise wild type.

TABLE 32
Data Summary for G567

| | Promoter summary: Avg. ± StD. (Count) | | |
|---|---|---|---|
| | Brix (g sugar/ | | |
| Promoter | 100 g sample) | Lycopene (ppm) | Volume (m³) |
| AP1 | 6.31 ± 0.368 (2) | 71.1 ± 13.195 (2) | 0.17 ± 0.024 (3) |
| AS1 | 5.8 ± 0.375 (2) | 89.39 ± 10.479 (2) | 0.18 ± 0.055 (3) |
| LTP1 | 5.87 ± NA (1) | 81.33 ± NA (1) | 0.26 ± 0.106 (3) |
| PD | 5.83 ± NA (1) | 81.02 ± NA (1) | 0.17 ± 0.072 (3) |
| RBCS3 | 5.6 ± 0.035 (2) | 61.79 ± 13.096 (2) | 0.25 ± 0.029 (3) |
| STM | NA | NA | 0.2 ± NA (1) |

### G580 (SEQ ID NO: 41 and 42)

[0367] Published background information. G580 was identified in the sequence of BAC T17A5, GenBank accession number AF024504, released by the Arabidopsis Genome Initiative. The annotation of G580 in BAC AF024504 was experimentally confirmed.

[0368] Discoveries in Arabidopsis. The function of this gene was analyzed using transgenic plants in which G580 was expressed under the control of the 35S promoter. 35S::G580 plants displayed a variety of morphological phenotypes in the T1 generation when compared to controls. These overexpressor plants were small and spindly, had altered flower and silique development, and had reduced and inflorescence internode length. G580 overexpressors were otherwise physiologically and biochemically wild-type, although phenotypes caused by G580 may be attenuated in the T2 generation.

[0369] G580 appeared to be preferentially expressed in roots and flowers but was otherwise constitutive. Microarray analysis revealed no significant (p-value<0.01) change in G580 expression in all conditions examined.

[0370] Discoveries in tomato. The PG::G580 lines had poor fruit set, thus limiting the analysis to plant size. The fruit Brix level under the STM promoter was higher than the highest wild type level and ranked above the 95th percentile among all Brix measurements. Fruit lycopene levels under both the 35S and STM promoters were higher than the highest wild type level and ranked above the 95th percentile among all lycopene measurements. Lycopene level in Cruc::G580 fruit was also above controls (above 75th percentile). Arabidopsis plants overexpressing G580 displayed a variety of morphological phenotypes in the T1 generation when compared to controls. These overexpressor plants were small and spindly, had altered flower and silique development, and had reduced and inflorescence internode length. These data indicate that G580 may be an important regulator affecting lycopene and soluble solids in tomato fruit.

[0371] Other related data. G568 is a paralog of G580, however, this gene was not tested in the field trial. Arabidopsis plants overexpressing G568 displayed a variety of morphological phenotypes when compared to control plants but were otherwise biochemically and physiologically wild-type. These morphological phenotypes included narrow leaves, a darker green coloration, and bushy, spindly, poorly fertile shoots, dwarfing and flowering time alteration.

TABLE 33
Data Summary for G580

| | Promoter summary: Avg. ± StD. (Count) | | |
|---|---|---|---|
| | Brix (g sugar/ | | |
| Promoter | 100 g sample) | Lycopene (ppm) | Volume (m³) |
| 35S | 5.38 ± NA (1) | 111.92 ± NA (1) | 0.19 ± 0.04 (3) |
| Cruciferin | 4.6 ± NA (1) | 84.25 ± NA (1) | 0.26 ± 0.085 (2) |
| PG | NA | NA | 0.08 ± 0.011 (3) |
| STM | 6.7 ± 0.474 (2) | 106.67 ± 22.832 (2) | 0.16 ± 0.07 (3) |

### G635 (SEQ IUD NO: 43 and 44)

[0372] Published background information. 0635 corresponds to AT5G63420. This gene encodes a protein with similarities to the TH family of transcription factors. However, the locus is annotated at TAIR as encoding a metallo-beta-lactamase protein and is classified as having a potential role in chloroplast metabolism. G635 does not appear to have any closely related paralogs.

[0373] Discoveries in Arabidopsis. The function of this gene was analyzed using transgenic plants in which G635 was expressed under the control of the 35S promoter. 35S::G635 Arabidopsis lines generally appeared wild-type, but about 15% of the lines exhibited a very striking variegated phenotype in which sectors of white chlorotic tissues were observed on the leaves and stems. Such a phenotype implicated the gene in the regulation of pigmentation or chloroplast biogenesis. Interestingly, the lines that showed these effects had very low levels of transgene expression, suggesting that the phenotype might be the result of co-suppression or some related gene silencing type phenomenon. The morphological effects observed were consistent with the TAIR annotation of the locus being involved in chloroplast metabolism.

[0374] In some initial biochemical analyses performed on 35S::G635 Arabidopsis plants, one of three (non-chlorotic) lines tested showed an alteration in leaf insoluble sugar composition and had an increase in galactose levels. However, this phenotype was not observed in an initial repeat of the experiment; further repeats and examination of a larger number of lines would therefore be required to confirm or discount the effect. In addition to the effects above, G635 lines (non-chlorotic) showed enhanced performance in a first round C/N sensing screen. However, this result still awaits confirmation in repeat experiments.

[0375] RT-PCR experiments revealed that G635 was expressed at in a range of Arabidopsis tissue types. Microarray experiments performed revealed that G635 was significantly repressed in response to ABA, SA and NaCl.

[0376] Discoveries in tomato. The 35S, AP1, AS1 PG and RBCS3::G635 lines had poor fruit set, thus limiting the analysis to plant size. Both lycopene and soluble solid levels in PD::G635 fruits were markedly higher than those found in wild-type controls; ranking in the 95th percentile of all measurements. The results of Arabidopsis genomics studies performed and the annotation at TAIR suggest that the gene might have an endogenous role in the regulation of pigmentation or chloroplast biogenesis/metabolism. These data indicate that G635 may be an important regulator affecting lycopene and soluble solids in tomato fruit.

TABLE 34
Data Summary for G635

| | Promoter summary: Avg. ± StD. (Count) | | |
|---|---|---|---|
| | Brix (g sugar/ | | |
| Promoter | 100 g sample) | Lycopene (ppm) | Volume (m³) |
| 35S | NA | NA | 0.22 ± 0.013 (2) |
| AP1 | NA | NA | 0.2 ± 0.045 (3) |
| AS1 | NA | NA | 0.15 ± 0.14 (3) |
| PD | 6.85 ± NA (1) | 108.82 ± NA (1) | 0.22 ± 0.044 (3) |
| PG | NA | NA | 0.17 ± 0.031 (3) |
| RBCS3 | NA | NA | 0.27 ± NA (1) |

### G675 (SEQ ID NO: 45 and 46)

[0377] Published background information. G675 (At1 g34670) was discovered by its identification from an Arabidopsis EST based on its similarity to other proteins containing a conserved Myb motif. Subsequently, Kranz et al. (1998) published a partial cDNA sequence corresponding to G675, naming it AtMYB93. Reverse-Northern data suggest that this gene could be induced slightly by the plant growth regulators ABA and IAA, and a low level of expression was detected in roots but no other plant parts tested (Kranz et al. (1998)).

[0378] Discoveries in Arabidopsis. In Arabidopsis, a line homozygous for a T-DNA insertion in G675 as well as transgenic plants expressing G675 under the control of the 35S promoter were used to determine the function of this gene. The phenotype of the knockout mutant and overexpressing transgenic plants was wild-type in all assays performed.

[0379] A line homozygous for a T-DNA insertion in G675 as well as transgenic plants expressing G675 under the control of the 35S promoter were used to determine the function of this gene. The phenotype of the knockout mutant and overexpressing transgenic plants was wild-type in all assays performed. RT-PCR analysis of the endogenous levels of G675 suggested the gene was expressed at low levels in root and silique tissues, and at slightly higher levels in embryos and germinating seeds. No induction of G675 was detected in response to stress-related treatments, as determined by RT-PCR. Microarray analysis showed that G675 is induced in roots by ABA, mannitol, and NaCl; it is also induced briefly in the shoot by SA, potentially implicating it in the drought response pathways, although physiology assays did not show an altered response to osmotic or drought stress in the transgenic lines.

[0380] Discoveries in tomato. LTP1::G675 lines had poor fruit set, thus limiting the analysis to plant size. Under the regulatory control of AS1, RBCS3, and STM promoters, fruit lycopene levels were higher than the highest wild type level and ranked in the 95th percentile among all lycopene measurements. All three of these promoters are active in tomato fruits. 35S::G675 fruits also showed higher lycopene level than controls (above 75th percentile). In addition, plant size under the 35S and AP1 promoters ranked in the 95th percentile among all measurements. Additionally, STM- and AP1-G675 transgenic plants produced small fruits. These data indicate that G675 may be an important regulator affecting fruit lycopene and plant biomass.

TABLE 35
Data Summary for G675

| | Promoter summary: Avg. ± StD. (Count) | | |
|---|---|---|---|
| | Brix (g sugar/ | | |
| Promoter | 100 g sample) | Lycopene (ppm) | Volume (m³) |
| 35S | 5.23 ± 0.433 (3) | 50.09 ± 6.992 (3) | 0.33 ± 0.093 (3) |
| AP1 | 5.58 ± 1.082 (2) | 90.1 ± 2.729 (2) | 0.33 ± 0.129 (3) |
| AS1 | 6.22 ± 0.467 (2) | 97.58 ± 12.841 (2) | 0.2 ± 0.027 (3) |
| Cruciferin | 5.68 ± 0.676 (3) | 63.04 ± 2.741 (3) | 0.27 ± 0.05 (3) |
| LTP1 | NA | NA | 0.31 ± 0.036 (3) |
| PD | 4.47 ± NA (1) | 38.59 ± NA (1) | 0.27 ± 0.103 (3) |
| PG | 5.41 ± 0.325 (2) | 41.41 ± 6.498 (2) | 0.25 ± 0.035 (3) |
| RBCS3 | 6.18 ± NA (1) | 103 ± NA (1) | 0.26 ± 0.115 (2) |
| STM | 4.32 ± NA (1) | 101.65 ± NA (1) | 0.21 ± 0.002 (3) |

### G729 (SEQ ID NO: 47 and 48)

[0381] Published background information. G729 corresponds to KANADI (KAN1), a regulator of abaxial/adaxial polarity (Kerstetter et al. (2001), Eshed et al. (2001)). Further published work (Eshed et al. (2001)) describes a clade of four KANADI genes, and shows that KAN1 and KAN2 (G3034) act redundantly to promote abaxial cell fates. Plants carrying mutations in both kan1 and kan2 showed severe morphological abnormalities that are interpreted as adaxialization of abaxial structures. Plants overexpressing KAN1, KAN2, or KAN3 (G730) under the 35S promoter generally arrested at the cotyledon stage, while only a small minority survived to produce leaves. Overexpressing KAN1, KAN2, or KAN3 under the AS1 promoter, which does not drive expression in the meristem, caused abaxialization of adaxial structures.

[0382] Discoveries in Arabidopsis. Subtle morphological changes were noted for the G729 knockout: the first pair of true leaves stood upright, though rosette stage plants looked normal, and older plants had slightly shorter siliques and rounder cauline leaves than control (WS-0) plants. Upon further examination of the silique phenotype, we found that many KO.G729 flowers possessed an additional one or two vestigial carpels fused to either side of the replum of main carpel. In some flowers, these extra carpels were very small and filamentous, in other cases they were more extensively developed. These results were consistent with the published phenotype of KANADI knockouts (Kerstetter et al. (2001); Eshed et al. (2001)). Overexpression of G729 under the 35S promoter produced highly abnormal plants or complete lethality, also consistent with published data (Eshed et al. (2001).

[0383] G729 was expressed at low levels throughout the plant with higher levels of expression in embryos and siliques, and it is not induced by any condition tested. Microarray analysis revealed no significant change (p-value<0.01) in G729 expression in all conditions examined.

[0384] Discoveries in tomato. Tomato plants overexpressing G729 under the cruciferin and PG promoters scored in the 95th percentile for plant size. These plants generally exhibited higher lycopene content than controls as well. The cruciferin and PG promoters are both active in tomato seedlings, as well as in fruits and seeds.

[0385] LTP1::G729 lines were are also significantly larger than controls. The PG::G729 plants were noted to have heavy fruit set, indicating that the increase in plant volume did not represent production of vegetative mass at the expense of fruit set. This result was somewhat surprising, given the published role of the KANADI genes in regulation of abaxial/adaxial polarity. It is possible that the action of these genes is through regulation of differential growth, and low level expression causes a non-specific growth increase.

[0386] Other related data. G730, G1040, and G3034 are paralogs of G729. None of these genes have been tested in the ATP field trials yet. G730 (KAN3) and G3034 (KAN2) are also implicated in determination of abaxial polarity in Arabidopsis (Eshed et al. (2001).

TABLE 36
Data Summary for G729

| | Promoter summary: Avg. ± StD. (Count) | | |
|---|---|---|---|
| | Brix (g sugar/ | | |
| Promoter | 100 g sample) | Lycopene (ppm) | Volume (m³) |
| 35S | 5.41 ± 0.373 (3) | 49.25 ± 5.438 (3) | 0.3 ± 0.04 (3) |
| Cruciferin | 5.57 ± 0.07 (3) | 79.11 ± 6.816 (3) | 0.41 ± 0.042 (3) |
| PG | 5.61 ± 0.845 (3) | 64.85 ± 35.15 (3) | 0.36 ± 0.039 (3) |

### G812 (SEQ ID NO: 49 and 50)

[0387] Published background information. The sequence of G812 (At3g511910) was initially obtained from the Arabidopsis sequencing project, GenBank accession number AL049711.3 (GI:6807566), based on sequence similarity to the heat shock transcription factors. G812 is a member of the class-A HSFs (Nover (1996)) characterized by an extended HR-A/B oligomerization domain.

[0388] Discoveries in Arabidopsis. The function of this gene was analyzed using transgenic plants in which G812 was expressed under the control of the 35S promoter. 35S::G812 Arabidopsis plants showed better tolerance to infection with the necrotrophic fungal pathogen Botrytis cinerea when compared to wild-type control plants. T1 transgenic plants were generally smaller than wild type and somewhat spindly.

G812 transcripts in wild type Arabidopsis were below detectable level in all tissues and biotic/abiotic treatments examined. Microarray analysis revealed a significant (p-value<0.01), but transient reduction (8 hr time point) in G812 expression level in root of cold-treated (4° C.) plants. Similarly, we observed transient induction of G812 in root, 0.5 hr after treatment with ABA. No changes in G812 expression were observed in response to other biotic and abiotic treatments.

[0389] Discoveries in tomato. LTP1::G812 lines had poor fruit set, thus limiting the analysis to plant size. Transgenic tomato plants expressing G812 under the seed (cruciferin) and fruit (PD) promoters were larger than wild type control; ranking among the 95th percentile of all volumetric measurements. Similarly, but to a lesser extent, LTP1, RBSCS3 and STM lines were larger than controls (90th percentile). All transgenic tomato seedlings expressing G812, regardless of the promoter, were more tolerant to extended drought conditions. This indicated that the transgenic G812 tomatoes were better adapted to water limiting conditions, resulting in increased fitness in the field and greater size. Constitutive ectopic expression of G812 resulted in moderate pleiotropic effects. Seedlings were etiolated and mature plants somewhat smaller than wild type. The same phenotypes were observed in 35S::G1560 tomato seedlings. G812 and G1560 are from the same phylogenetic clade and may be functionally redundant.

[0390] Transgenic 35S::G812 Arabidopsis plants were smaller than wild type, spindly and more tolerant to infection with the necrotrophic fungal pathogen Botrytis cinerea. This observation suggested that the increased fitness of G812 transgenic tomatoes in field-grown condition may be related to better tolerance to biotic and/or abiotic stresses.

[0391] Other related data. The paralog of G812, G2467, was not tested in field trial. Transgenic 35S::G2467 Arabidopsis plants were generally smaller than wild type, and formed rather thin inflorescence stems that carried flowers that sometimes displayed abnormal, poorly developed organs. Preliminary characterization tomato seedlings ectopically expressing G1560 revealed similar etiolated and drought tolerance phenotypes.

TABLE 37
Data Summary for G812

| | Promoter summary: Avg. ± StD. (Count) | | |
|---|---|---|---|
| | Brix (g sugar/ | | |
| Promoter | 100 g sample) | Lycopene (ppm) | Volume (m³) |
| 35S | 4.75 ± NA (1) | 55.24 ± NA (1) | 0.13 ± 0.044 (3) |
| Cruciferin | 5.96 ± 0.177 (2) | 50.38 ± 2.383 (2) | 0.35 ± 0.166 (3) |
| LTP1 | NA | NA | 0.29 ± 0.193 (3) |
| PD | 5.43 ± 0.198 (2) | 66.04 ± 21.666 (2) | 0.45 ± 0.152 (3) |
| RBCS3 | 5.87 ± 0.241 (3) | 95.29 ± 11.821 (3) | 0.27 ± 0.11 (3) |
| STM | 6.15 ± 0.156 (2) | 79.87 ± 5.254 (2) | 0.3 ± 0.094 (3) |

### G843 (SEQ ID NO: 51 and 52)

[0392] Published background information. The sequence of G843 (At3g07740) was initially obtained from the Arabidopsis sequencing project, GenBank accession number AC009176.5 (GI: 12408710), based on sequence similarity to the yeast transcriptional activator ADA2 (GI: 6320656). The Arabidopsis genome encodes two ADA2 proteins, G843 is designated as the transcriptional adaptor ADA2a. In yeast ADA2 proteins are part of the GCN5 multi-component complex of histone acetyltransferase. The paralog is G285 (ADA2b).

[0393] Discoveries in Arabidopsis. The function of G843 was analyzed through its ectopic overexpression in Arabidopsis. The characterization of 35S::G843 transgenic lines revealed no significant morphological, physiological or biochemical changes when compared to wild-type controls.

[0394] The analysis of the endogenous level of G843 transcripts by RT-PCR revealed a constitutive expression in all tissues and a moderate induction in response to auxin and heat shock treatment. Microarray analysis revealed no significant (p-value<0.01) alteration in G843 expression in all conditions examined.

[0395] Discoveries in tomato. In plants expressing G843 under the leaf (RBCS3), flower (AP1) and the fruit (PG) promoters, soluble solids (Brix measurement) in fruit was greater than that in wild type controls; ranking in the 95th percentile among all measurements. The RBCS3 and AP1 promoters are active in tomato fruits. Lycopene level in mature fruit of plants expressing G843 under the constitutive (35S) and the flower (AP1) promoters was higher than wild type controls; also ranking in the 95th percentile of all lycopene measurements. Expression of G843 under the seed (cruciferin) and meristem (STM) promoters negatively impacted fruit yield and maturation. These observations suggested that G843 may be an important regulator affecting soluble solids and lycopene in ripening tomato fruits. Overexpression of G843 resulted in no other significant pleiotropic effects on growth and development in transgenic tomato plants.

[0396] Other related data. The paralog of G843, G285, was not tested in field trial. Similar to G843, transgenic 35S::G285 Arabidopsis plants were indistinguishable from wild type controls.

TABLE 38
Data Summary for G843

| | Promoter summary: Avg. ± StD. (Count) | | |
|---|---|---|---|
| | Brix (g sugar/ | | |
| Promoter | 100 g sample) | Lycopene (ppm) | Volume (m³) |
| 35S | 5.75 ± NA (1) | 97.32 ± NA (1) | 0.27 ± 0.104 (3) |
| AP1 | 6.59 ± NA (1) | 100.95 ± NA (1) | 0.19 ± 0.097 (3) |
| AS1 | 5.82 ± 0.453 (2) | 68.63 ± 52.51 (2) | 0.16 ± 0.021 (3) |
| Cruciferin | 5.36 ± 0.29 (2) | 68.13 ± 17.763 (2) | 0.18 ± 0.032 (3) |
| PG | 6.26 ± NA (1) | 67.67 ± NA (1) | 0.28 ± 0.014 (3) |
| RBCS3 | 6.61 ± NA (1) | 65.64 ± NA (1) | 0.21 ± 0.01 (3) |
| STM | 5.76 ± NA (1) | 74.27 ± NA (1) | 0.19 ± 0.012 (2) |

### G881 (SEQ ID NO: 53 and 54)

[0397] Published background information. G881 (At4g31800) corresponds to AtWRKY18. There is no published literature beyond the general description of WRKY family members (Eulgem et al. (2000)).

[0398] Discoveries in Arabidopsis. The function of this gene was analyzed using transgenic plants in which G881 was expressed under the control of the 35S promoter. While one line of 35S::G881 plants showed a very marginal early flowering phenotype, all other lines were wild type morphologically. Arabidopsis 35S::G881 overexpressors were more susceptible to infection with the fungal pathogens Erysiphe orontii and Botrytis cinerea. These results, together with the fact that many WRKY family proteins are known to be involved in the disease signaling, implicate G881 in the disease response.

[0399] G881 is ubiquitously expressed, but appeared to be significantly induced in response to salicylic acid treatment. Additionally, in a soil drought microarray experiment, G881 was found to be repressed in Arabidopsis leaves during moderate drought stress, as well as after rewatering. G881 was highly (up to ˜14-fold) induced by salicylic acid in both root and shoot tissue. Induction was also observed in response to methyl jasmonate. Interestingly, in response to mannitol, cold or sodium chloride treatments, G881 was repressed at early timepoints (e.g., 0.5 hr and 1 hr), but induced to high levels at later timepoints (e.g., 4 and 8 hr).

[0400] Discoveries in tomato. Transgenic tomatoes expressing G881 under the AP1, LTP1, RBCS3 or STM promoters were analyzed for alteration in plant size, soluble solids and lycopene. The Cruciferin, PD and PG::G881 lines had poor fruit set, thus limiting the analysis to plant size. The fruit lycopene levels under the STM promoter rank in the 95th percentile among all lycopene measurements, and were higher than in any wild-type plant measured. Additionally, STM::G881 plants did not produce any ripe fruit. Arabidopsis 35 S:: These data indicate that G881 may be an important regulator affecting lycopene level in tomato fruit, with a negative impact on fruit maturation.

[0401] Other related data. G986 is a paralog of G881, however, this gene was not tested in the field trial. The function of 35S::G986 was analyzed in transgenic Arabidopsis and resulting plants were indistinguishable from wild-type controls in all assays performed. G986 was found to be ubiquitously expressed in all tissues tested.

TABLE 39
Data Summary for G881

| | Promoter summary: Avg. ± StD. (Count) | | |
|---|---|---|---|
| | Brix (g sugar/ | | |
| Promoter | 100 g sample) | Lycopene (ppm) | Volume (m³) |
| AP1 | 5.71 ± 0.629 (2) | 70.06 ± 24.918 (2) | 0.08 ± 0.015 (3) |
| Cruciferin | NA | NA | 0.06 ± 0.026 (3) |
| LTP1 | 5.61 ± NA (1) | 74.7 ± NA (1) | 0.07 ± 0.004 (2) |
| PD | NA | NA | 0.03 ± 0.003 (2) |
| PG | NA | NA | 0.09 ± 0.004 (3) |
| RBCS3 | 5.29 ± 0.198 (2) | 70.69 ± 30.172 (2) | 0.09 ± 0.027 (2) |
| STM | 4.85 ± NA (1) | 108.85 ± NA (1) | 0.08 ± 0.046 (3) |

### G937 (SEQ ID NO: 55 and 56)

[0402] Published background information. G937 was identified in the sequence of BAC F14J22, GenBank accession number AC011807, released by the Arabidopsis Genome Initiative.

[0403] Discoveries in Arabidopsis. The function of this gene was analyzed using transgenic plants in which G937 was expressed under the control of the 35S promoter. The majority of 35S::G937 primary transformants were smaller than wild type, slightly slow developing, and produced thin inflorescence sterns that carried relatively few siliques. In later analysis, G937 was found to have a phenotype in a C/N sensing assay. Anthocyanin accumulation was slightly less than that observed in control wild-type seedlings in one of three lines tested. Thus, G937 might have a role in the response to nutrient limitation.

[0404] In our microarray analyses, G937 was found to be induced during drought stress and by sodium chloride treatment, and repressed by ABA treatment.

[0405] Discoveries in tomato. Plants expressing G937 under the PG promoter were in the 95th percentile for plant size. Analysis of G937 function and expression in Arabidopsis suggests that this gene plays a role in response to nutrient and drought stress. Therefore, the increased fitness of G937 transgenic tomatoes in field-grown condition may be related to drought tolerance and/or better nutrient utilization.

[0406] In contrast, AP1::G937 plants were noted to be compact and bear small fruit, although the plant volume measurements were within the normal range.

TABLE 40
Data Summary for G937

| | Promoter summary: Avg. ± StD. (Count) | | |
|---|---|---|---|
| | Brix (g sugar/ | | |
| Promoter | 100 g sample) | Lycopene (ppm) | Volume (m³) |
| 35S | 5.4 ± 0.327 (3) | 43.81 ± 22.048 (3) | 0.24 ± 0.061 (3) |
| AP1 | 5.77 ± NA (1) | 84.56 ± NA (1) | 0.3 ± 0.045 (2) |
| AS1 | 6 ± 0.146 (3) | 57.23 ± 17.205 (3) | 0.24 ± 0.051 (3) |
| PG | 5.07 ± 0.231 (3) | 44.18 ± 21.243 (3) | 0.33 ± 0.027 (3) |

### G989 (SEQ ID NO: 57 and 58)

[0407] Published background information. G989 corresponds to a predicted SCARECROW (SCR) gene regulator-like protein in annotated P1 clone MJC20 (AB017067), from chromosome 5 of Arabidopsis (Kaneko, et al. (1998)). This gene is a member of the SCARECROW branch of the SCR (or GRAS) phylogenetic tree, and it is closely related to SCR (Bolle, 2004). SCARECROW is involved in meristem maintenance and development, and has also been proposed to be involved in auxin regulation (Sabatini et al. (1999)).

[0408] Discoveries in Arabidopsis. The function of G989 was analyzed using transgenic plants in which G989 was expressed under the control of the 35S promoter. Plants overexpressing G989 were somewhat early flowering. The phenotype of the transgenic plants was wild type in all other assays performed.

[0409] G989 appeared to be expressed at highest levels in embryo tissue, and at low levels in all other tissues tested. Expression of G989 appeared to be induced in response to treatment with auxin, ABA, heat and drought, and to a lesser extent in response to salt treatment and osmotic stress. G989 was also shown to be up-regulated 3× in the leaves of drought-stressed plants in microarray experiments.

[0410] Discoveries in tomato. The size of the Cruciferin::G989 and STM::G989 tomato plants was markedly higher than of wild-type controls; ranking in the 95th percentile of all volumetric measurements. LTP1::G989 plants were also larger than wild type, but were not above the 95th percentile. All three of these promoters are associated with relatively low levels of expression in vegetative tomatoes. This indicates that low levels of G989 are effective in increasing biomass under field conditions.

[0411] Expression analyses indicated that G989 may be involved in stress response pathways.

[0412] Other relevant data: Bolle have suggested that G989 may also be involved in meristem/growth pathways Bolle (2004). One hypothesis is that G989, when expressed at relatively low levels and under adverse field conditions, may function to promote plant/meristem growth.

[0413] We have not yet identified a paralog of G989 in Arabidopsis. Our data showing induction of 0989 by stress treatments may indicate that G989 functions via stress pathways. Published information on the SCR family indicates that this family of genes function to promote meristem growth and development. Taken together, it is possible that G989 provides a link between stress response and the promotion of growth/biomass, and may promote plant growth in the periodically stressful environments common in the field.

TABLE 41
Data Summary for G989

| | Promoter summary: Avg. ± StD. (Count) | | |
|---|---|---|---|
| | Brix (g sugar/ | | |
| Promoter | 100 g sample) | Lycopene (ppm) | Volume (m³) |
| Cruciferin | 5.37 ± 0.368 (3) | 51.51 ± 17.663 (3) | 0.32 ± 0.015 (3) |
| LTP1 | 5.65 ± 0.318 (2) | 70.19 ± 8.726 (2) | 0.3 ± 0.057 (3) |
| STM | 5.41 ± NA (1) | 79.5 ± NA (1) | 0.32 ± NA (1) |

### G1007 (SEQ ID NO: 59 and 60)

[0414] Published background information. G1007 corresponds to gene At2g25820 (GenBank accession number AAC42248). Sakuma et al. (2002) categorized G1007 into the A4 subgroup of the AP2 transcription factor family, with the A family related to the DREB and CBF genes.

[0415] Discoveries in Arabidopsis. The function of this gene was analyzed using transgenic plants in which G1007 was expressed under the control of the 35S promoter. Overexpression of G1007 under control of the 35S promoter produced very small plants with poor fertility. Many plants arrested development in the vegetative phase and senesced without producing an inflorescence. Those lines that did bolt formed very spindly shoots bearing small poorly fertile flowers.

[0416] Global transcript profiling under a variety of stress conditions revealed repression of G1007 expression under severe drought only, with repression maintained but reduced during early recovery from drought. G1007 transcripts were below detectable level in all tissues examined by RT-PCR.

[0417] Discoveries in tomato. 35S::G1007 lines had poor fruit set, thus limiting the analysis to plant size. Lycopene content in fruit and Brix were greater than that in wild type controls in plants expressing G1007 under the AP1 promoter, with a rank in the 95th percentile among all measurements. In addition, Brix was also higher in G1007 overexpressors under the Cruciferin promoter. Plant size in Arabidopsis and tomato seedlings were also dramatically reduced upon overexpression of G1007 under the constitutive 35S promoter. In the most severe phenotypes, Arabidopsis plants senesced without producing an inflorescence. These data indicate that G1007 may be an important regulator affecting lycopene and soluble solids in tomato fruit.

[0418] Other related data. G1836 is a paralog of G1007, however, this gene was not tested in the field trial. Overexpression of G1846 in Arabidopsis caused significant growth defects. In general, transformants were smaller, and the reduced size of the inflorescences resulted in only a low seed yield.

TABLE 42
Data Summary for G1007

| | Promoter summary: Avg. ± StD. (Count) | | |
|---|---|---|---|
| | Brix (g sugar/ | | |
| Promoter | 100 g sample) | Lycopene (ppm) | Volume (m³) |
| 35S | NA | NA | 0.18 ± NA (1) |
| AP1 | 6.42 ± NA (1) | 100.75 ± NA (1) | 0.17 ± 0.092 (3) |
| Cruciferin | 6.67 ± NA (1) | 26.35 ± NA (1) | 0.16 ± 0.023 (3) |

### G1053 (SEQ ID NO: 61 and 62)

[0419] Published background information. G1053 was identified in the sequence of BAC T7123, GenBank accession number U89959, released by the Arabidopsis Genome Initiative.

[0420] Discoveries in Arabidopsis. The boundaries of G1053 in BAC T7123 were experimentally determined and the function of G1053 was analyzed using transgenic plants in which this gene was expressed under the control of the 35S promoter. G1053 overexpressing lines appeared to be small, slow growing and displayed curled leaves and spindly stems.

[0421] G1053 expression seemed to be restricted to shoots and siliques. Microarray analysis revealed no significant change (p-value<0.01) in G1053 expression in all conditions examined.

[0422] Discoveries in tomato. 35S, AS1, LTP1, PG and RCBS3::G1053 lines had poor fruit set, thus limiting the analysis to plant size. Soluble solids under the Cruciferin promoter was higher than the highest wild type level and ranked in the 95th percentile among all Brix measurements. In addition, under the AP1 promoter, plants were larger wild type controls in the field and ranked in the 95th percentile among all volumetric measurements. In Arabidopsis, G1053 expression seemed to be restricted to shoots and siliques. G1053 overexpressing Arabidopsis lines were small, slow growing and had curled leaves and spindly stems. These data indicate that G1053 may be an important regulator affecting plant biomass and soluble solids in tomato fruit.

[0423] Other related data. The paralog of G1053, G2629, was not tested in field trial. In Arabidopsis, overexpression of G2629 produced no consistent effects on Arabidopsis morphology or physiology in all assays performed.

TABLE 43
Data Summary for G1053

| | Promoter summary: Avg. ± StD. (Count) | | |
|---|---|---|---|
| | Brix (g sugar/ | | |
| Promoter | 100 g sample) | Lycopene (ppm) | Volume (m³) |
| 35S | NA | NA | 0.25 ± 0.083 (3) |
| AP1 | 5.56 ± 1.075 (2) | 69.94 ± 0.502 (2) | 0.46 ± 0.178 (3) |
| AS1 | NA | NA | 0.36 ± 0.12 (3) |
| Cruciferin | 6.55 ± NA (1) | 53.48 ± NA (1) | 0.2 ± NA (1) |
| LTP1 | NA | NA | 0.24 ± 0.102 (3) |
| PG | NA | NA | 0.27 ± 0.006 (3) |
| RBCS3 | NA | NA | 0.22 ± 0.097 (3) |
| STM | 6.16 ± 0.085 (2) | 94.98 ± 12.084 (2) | 0.28 ± 0.09 (3) |

### G1078 (SEQ ID NO: 63 and 64)

[0424] Published background information. G1078 is the published bZIPt2 cDNA described by Lu and Ferl (1995).

[0425] Discoveries in Arabidopsis. The function of G1078 was analyzed using transgenic plants in which G1078 was expressed under the control of the 35S promoter. The phenotype of these transgenic plants was wild type in all assays performed. G1078 appeared to be constitutively expressed in all tissues and environmental conditions tested by RT-PCR. However, GeneChip experiment indicated the G1078 is repressed by most abiotic stress treatments, including drought, ABA, and mannitol.

[0426] Discoveries in tomato. Cruciferin, PG and STM::G1078 lines had poor fruit set, thus limiting the analysis to plant size. Fruit lycopene level under the RBCS3 promoter was higher than the highest wild type and ranked in the 95th percentile among all measurements. Expression of G1078 under the AP1 and STM promoters result in plants with longer vegetative period. Arabidopsis 35S::G1078 transgenic plants were wild type phenotype in all assays performed. These data indicated that G1078 may be an important regulator affecting lycopene in ripening tomato fruit.

[0427] Other related data. The paralog of G1078, G577, was not tested in tomato in the present field trial. Overexpression of G577 in Arabidopsis produced a range of effects on growth and development, including slight smallness and slower growth, dark green leaves with elevated levels of anthocyanins and wrinkled curled leaves that formed yellow patches. It is possible that G577 is a regulator of anthocyanins in Arabidopsis.

TABLE 44
Data Summary for G1078

| | Promoter summary: Avg. ± StD. (Count) | | |
|---|---|---|---|
| | Brix (g sugar/ | | |
| Promoter | 100 g sample) | Lycopene (ppm) | Volume (m³) |
| AP1 | 5.59 ± 0.495 (2) | 76.07 ± 9.136 (2) | 0.26 ± 0.043 (3) |
| Cruciferin | NA | NA | 0.14 ± 0.032 (2) |
| PG | NA | NA | 0.17 ± 0.088 (3) |
| RBCS3 | 5.97 ± 0.359 (3) | 105.46 ± 8.59 (3) | 0.23 ± 0.075 (3) |
| STM | NA | NA | 0.22 ± 0.048 (3) |

### G1226 (SEQ ID NO: 65 and 66)

[0428] Published background information. G1226 corresponds to AtbHLH057, as described by Heim et al., (2003) and Toledo-Ortiz et al. (2003), which describe the Arabidopsis bHLH gene family.

[0429] Discoveries in Arabidopsis. Overexpression of G1226 under control of the 35S promoter in Arabidopsis conferred an earlier flowering phenotype and a statistically significant elevation in seed oil content.

[0430] In a series of stress challenge array background experiments, G1226 was found to be induced during recovery from drought treatment, and repressed in shoots of plants treated with ABA, SA or cold. RT-PCR analysis indicates that G1226 is constitutively expressed in all tissues, except in root where it is undetected.

[0431] Discoveries in tomato. 35S and PG::G1226 lines had poor fruit set, thus limiting the analysis to plant size. Lycopene content in fruit was greater than that in wild type controls in plants expressing G1226 under the RBCS3 promoter, with a rank in the 95th percentile among all measurements. These data indicate that G1226 may be an important regulator affecting lycopene in ripening tomato fruit.

TABLE 45
Data Summary for G1226

| | Promoter summary: Avg. ± StD. (Count) | | |
|---|---|---|---|
| | Brix (g sugar/ | | |
| Promoter | 100 g sample) | Lycopene (ppm) | Volume (m³) |
| 35S | NA | NA | 0.14 ± 0.02 (3) |
| Cruciferin | 5.32 ± 1.111 (3) | 65.88 ± 32.849 (3) | 0.25 ± 0.05 (3) |
| PG | NA | NA | 0.2 ± 0.043 (3) |
| RBCS3 | 5.69 ± 0.113 (2) | 102.73 ± 25.095 (2) | 0.27 ± 0.023 (3) |

### G1273 (SEQ ID NO: 67 and 68)

[0432] Published background information. G1273 (At2g37260, AtWRKY44) corresponds TRANSPARENT TESTA GLABRA2 (TTG2; Johnson et al. (2002)). From the work of Johnson et al., it is known that TTG2 is involved in trichome development and tanin/mucilage production in seed coat tissue. TTG2 is strongly expressed in trichomes throughout their development, in the endothelium of developing seeds (in which tannin is later generated) and subsequently in other layers of the seed coat, as well as in the atrichoblasts of developing roots. TTG2 acts downstream of the trichome initiation genes TTG1 and GLABROUS1. In the seed coat, TTG2 expression requires TTG1 function in the production of tannin. In ttg2 mutants, synthesis of tannins, but not anthocyanins is disrupted. Therefore, the authors speculate that TTG2 regulates the expression of gene(s) involved in the tannin biosynthetic pathway after the leucoanthocyanidin branch point.

[0433] Discoveries in Arabidopsis. G1273 was found to be expressed in a variety of tissues (eaves, flowers, embryo, silique, germinating seedling) at apparently low levels. Additionally, in a soil drought microarray experiment, G1273 was found to be induced 4.6-fold (p<0.01) in the leaf tissue of plants exposed to moderate drought conditions.

[0434] The function of G1273 was studied using transgenic plants in which the gene was expressed under the control of the 35S promoter. No consistent morphological alterations were detected in G1273 overexpressing plants. G1273 transgenic lines behave similarly to wild-type controls in all physiological and biochemical assays performed.

[0435] Discoveries in tomato. PG::G1273 lines had poor fruit set thus, limiting the analysis to plant size. The fruit lycopene levels of G1273 overexpressors under the control of the AP1 promoter ranked in the 95th percentile among all lycopene measurements, and were higher than in any wild-type plant measured. These data indicate that G1273 may be an important regulator affecting lycopene in ripening tomato fruit.

TABLE 46
Data Summary for G1273

| | Promoter summary: Avg. ± StD. (Count) | | |
|---|---|---|---|
| | Brix (g sugar/ | | |
| Promoter | 100 g sample) | Lycopene (ppm) | Volume (m³) |
| 35S | 4.55 ± 0.75 (2) | 36.78 ± 14.913 (2) | 0.27 ± 0.033 (3) |
| AP1 | 5.94 ± NA (1) | 110.56 ± NA (1) | 0.21 ± NA (1) |
| Cruciferin | 5.62 ± 0.113 (2) | 51.61 ± 12.113 (2) | 0.22 ± 0.047 (3) |
| PD | 5.87 ± 0.46 (2) | 59.13 ± 44.774 (2) | 0.22 ± 0.01 (3) |
| PG | NA | NA | 0.18 ± 0.062 (3) |
| STM | 5.55 ± 0.276 (3) | 75.44 ± 17.32 (3) | 0.24 ± 0.051 (3) |

### G1324 (SEQ II) NO: 69 and 70)

[0436] Published background information. The full-length cDNA sequence of G1324 (At1g68320) was discovered from a partial published clone corresponding to AtMYB62. Reverse-Northern data suggest that this gene is expressed at low levels in siliques (Kranz et al. (1998)).

[0437] Discoveries in Arabidopsis. As determined by RT-PCR, G1324 is expressed in flowers, siliques and seedlings. No expression of G1324 was detected in the other tissues tested. G1324 expression is not induced under any environmental stress-related treatment tested, based on RT-PCR and microarray analysis.

[0438] The function of G1324 was analyzed using transgenic plants in which the gene was expressed under the control of the 35S promoter. The phenotype of these transgenic plants was wild type in all assays performed. Morphological analysis showed that the primary transformants of G1324 were small, dark green, and late flowering. However, these phenotypes were apparently unstable, as T2 lines 1, 6, and 9 were scored as wild type.

[0439] Discoveries in tomato. The fruit lycopene level under the PG promoter was higher than the highest wild type level and ranked in the 95th percentile among all lycopene measurements. In Arabidopsis, 35S::G1324 transgenic plants were wild type in all assays performed. These data indicated that G1324 may be an important regulator affecting lycopene in ripening tomato fruit.

[0440] Other related data. The paralog of G1324, G2893, was not tested in tomato in the present field trial. In Arabidopsis, transgenic plants overexpressing G2893 were generally small, slightly dark green, and produced flowers with a variety of abnormalities in organ identity, organ number, and organ fusions. Due to the small size and poor fertility of some T2 lines, insufficient material was available for a complete set of biochemical assays. 35S::G2893 plants were wild type in the physiology assays performed.

TABLE 47
Data Summary for G1324

| | Promoter summary: Avg. ± StD. (Count) | | |
|---|---|---|---|
| | Brix (g sugar/ | | |
| Promoter | 100 g sample) | Lycopene (ppm) | Volume (m³) |
| 35S | 5.03 ± 0.777 (3) | 76.73 ± 12.19 (3) | 0.07 ± 0.016 (3) |
| AP1 | 5.86 ± 0.304 (2) | 70.34 ± 51.47 (2) | 0.09 ± 0.026 (3) |
| AS1 | 5.39 ± NA (1) | 74.16 ± NA (1) | 0.08 ± 0.028 (3) |
| Cruciferin | 5.34 ± 0.503 (3) | 55.36 ± 5.078 (3) | 0.1 ± 0.031 (3) |
| LTP1 | 5.79 ± 0.219 (2) | 57.58 ± 7.828 (2) | 0.1 ± 0.034 (2) |
| PD | 5.76 ± 0.82 (2) | 60.83 ± 5.148 (2) | 0.12 ± 0.001 (2) |
| PG | 5.52 ± NA (1) | 112.42 ± NA (1) | 0.08 ± 0.049 (2) |

### G1328 (SEQ ID NO: 71 and 72)

[0441] Published background information. The full-length cDNA sequence of G1328 (At4g05100) was determined from a partial published clone corresponding to MYB74. Reverse-Northern data suggest that this gene is detected in mature leaves, cauline leaves, and siliques; it appeared to be induced in mature leaves in response to drought treatment, and in etiolated seedlings in response to light (Kranz et al. (1998)). The promoter sequence of G1328 has been reported to contain ABRE, CE1, and W box cis-elements, which are known to be involved in stress responses (Denekamp and Smeekens, 2003).

[0442] Discoveries in Arabidopsis. The function of G1328 was analyzed using transgenic plants in which the gene was expressed under the control of the 35S promoter. Arabidopsis plants overexpressing G1328 in primary transformants displayed a phenotype of numerous secondary inflorescence meristems that produced extra leaves and short secondary bolts. However, this phenotype was unstable in the T2 generation. The phenotype of these transgenic plants was wild type in all physiological assays performed.

[0443] RT-PCR analysis suggests that endogenous G1328 transcripts were found at very low levels in roots, embryos, seedlings and siliques. Microarray experiments showed that G1328 transcript accumulation was induced by ABA, drought, and osmotic stress treatments; it was also slightly induced in the G912 overexpressing lines.

[0444] Discoveries in tomato. 35S and RBCS3::G1328 lines had poor fruit set, thus limiting the analysis to plant size. Under the RBCS3 promoter, overall plant size ranked in the 95th percentile among all measurements. These data indicate that G1328 may be an important regulator affecting plant biomass in tomato.

[0445] Other related data. The paralog of G1328, G198, was not tested in tomato in the present field trial. In Arabidopsis, the phenotype of G198 overexpressors was wild-type for all assays performed. The morphological phenotype of G198 overexpressors suggests this gene could function in flowering time. G198 as a similar expression pattern as G1328 (mainly induced by drought, ABA, and osmotic stress treatments), as determined by RT-PCR and microarray analysis.

TABLE 48
Data Summary for G1328

| | Promoter summary: Avg. ± StD. (Count) | | |
|---|---|---|---|
| | Brix (g sugar/ | | |
| Promoter | 100 g sample) | Lycopene (ppm) | Volume (m³) |
| 35S | NA | NA | 0.18 ± 0.083 (2) |
| AP1 | 5.41 ± 0.049 (2) | 57.34 ± 30.561 (2) | 0.27 ± 0.059 (3) |
| AS1 | 5.24 ± 0.064 (2) | 81.69 ± 1.435 (2) | 0.25 ± 0.051 (3) |
| RBCS3 | NA | NA | 0.32 ± NA (1) |

### G1444 (SEQ ID NO: 73 and 74)

[0446] Published background information. The sequence of G1444 (At2g42040) was initially obtained from the Arabidopsis sequencing project, GenBank accession number U90439.3 (GI: 20198316), based on sequence similarity to the rice Growth-regulating-factor1 (GRF1, GI: 6573149; Knaap et al. (2000)). Nine of the ten members of the Arabidopsis atGRF family were recently published by Kim et al. (2003). Their analysis of the gene family did not include G1444, a phylogenetically distant member of the atGRF family with the characteristic WRC domain. Detailed characterization of 35S::atGRF1 and 35S::atGRF2 overexpressor in Arabidopsis revealed a significant increased in leaf/cotyledon surface area, 35-135% greater than in wild type control, and delayed shoot development (Kim et al, 2003). In the triple grf1 (G1439), grf2 (G1868), grf3 (G2334) mutants the opposite phenotype was observed in addition to delayed leaf development and fusion of cotyledon.

[0447] Discoveries in Arabidopsis. The function of G1444 was analyzed by ectopic overexpression in Arabidopsis. The characterization of G1444 transgenic lines revealed no significant morphological, physiological or biochemical changes when compared to wild-type controls.

[0448] The analysis of the endogenous level of G1444 transcripts by RT-PCR revealed low, constitutive expression in all tissues tested. Microarray analysis revealed a significant (p-value<0.01) reduction in G1444 expression level in leaves of soil-drought treated plants. No changes in G1444 expression were observed in response to other biotic and abiotic treatments.

[0449] Discoveries in tomato. In plants expressing G1444 under the leaf (LTP1) promoter, soluble solids (Brix measurement) in fruit was greater than that in wild type controls; ranking in the 95th percentile among all measurements. Transgenic tomato plants expressing G1444 under the constitutive (35S), meristem (AS1) and green-tissue (RBCS3) promoters were larger than wild type controls; ranking among the 95th percentile of all measurements. Supporting this phenotype, LTP1 and PD lines were both larger than controls (90th percentile). Transgenic tomato plants expressing G1444 under the meristem (STM) promoter also displayed smaller fruits.

[0450] Other related data. There is no close paralog for G1444. However, the size-related phenotype in tomato is supported by observation made in transgenic Arabidopsis constitutively overexpression a number of genes of the GRF-like family. Transgenic Arabidopsis overexpressing G1439 (atGRF1), G1868 (atGRF2), G1863, G2334 and G1865 have all shown alteration in leaf shape and coloration. They also are delayed in the onset of flowering.

TABLE 49
Data Summary for G1444

| | Promoter summary: Avg. ± StD. (Count) | | |
|---|---|---|---|
| | Brix (g sugar/ | | |
| Promoter | 100 g sample) | Lycopene (ppm) | Volume (m³) |
| 35S | 4.98 ± 0.794 (3) | 43.79 ± 6.021 (3) | 0.33 ± 0.015 (3) |
| AP1 | 5.81 ± NA (1) | 58.89 ± NA (1) | 0.25 ± NA (1) |
| AS1 | 5.45 ± 0.411 (3) | 45.23 ± 21.765 (3) | 0.32 ± 0.098 (3) |
| LTP1 | 6.63 ± 0.262 (2) | 56.77 ± 23.78 (2) | 0.3 ± 0.026 (3) |
| PD | 5.31 ± 0.601 (3) | 57.66 ± 10.019 (3) | 0.29 ± 0.084 (3) |
| RBCS3 | 5.45 ± NA (1) | 37.46 ± NA (1) | 0.32 ± 0.005 (2) |
| STM | 5.5 ± NA (1) | 49.65 ± NA (1) | 0.21 ± 0.187 (3) |

### G1462 (SEQ ID NO: 75 and 76)

[0451] Published background information. G1462 was identified in the sequence of BAC T13D8, GenBank accession number AC004473, released by the Arabidopsis Genome Initiative. It also corresponds to the AGI locus of At1g60300. A comprehensive analysis of NAC family transcription factors was recently published by Ooka et al. (2003) but did not include G1462. G1462 and G1463 are both tightly clustered to three other genes (G1461, G1464, and G1465) in a phylogenetic alignment and most likely arose through tandem gene duplication events.

[0452] Discoveries in Arabidopsis. The complete sequence of G1462 was determined. The function of this gene was analyzed using transgenic plants in which G1462 was expressed under the control of the promoter. The phenotype of these transgenic plants was wild-type in all assays performed.

[0453] G1462 transcript can be detected at very low levels in flower tissue only. The expression of G1462 in leaf does not respond to any environmental conditions tested.

[0454] Discoveries in tomato. Soluble solids and lycopene levels of plants overexpressing G1462 under the regulation of the AP1 promoter were significantly above wild type levels and in the 95th percentile of all measurements. A closely related paralog of G1462, G1463, demonstrated a significant increase in plant size when expressed from STM and RBCS3 promoters. These data indicate that G1462 may be an important regulator affecting size, lycopene and soluble solids in tomato.

[0455] Other related data. G1462 is highly related to four other putative paralogs. Included in these are G1461, G1463, G1464 and G1465. All genes within the G1462 clade are tightly clustered on chromosome number one suggesting that they may have originated through tandem gene duplication events. G1465 is most related to G1462 in a phylogenetic analysis and displayed alterations in compositions of leaf fatty acids in the phase I genomics screen. In addition, G1463 showed premature senescence. RT-PCR analysis of the endogenous levels of G1464 in leaves indicates that this gene could be induced by ABA, auxin, cold, drought, and salt.

TABLE 50
Data Summary for G1462

| | Promoter summary: Avg. ± StD. (Count) | | |
|---|---|---|---|
| | Brix (g sugar/ | | |
| Promoter | 100 g sample) | Lycopene (ppm) | Volume (m³) |
| AP1 | 6.36 ± NA (1) | 97.53 ± NA (1) | 0.22 ± 0.086 (3) |
| Cruciferin | 5.91 ± 0.424 (2) | 76.09 ± 11.342 (2) | 0.25 ± 0.064 (3) |

### G1463 (SEQ ID NO: 77 and 78)

[0456] Published background information. G2052 was identified in the sequence of BAC clone:F10E10, GenBank accession number AB028605, released by the Arabidopsis Genome Initiative. It also corresponds to the AGI locus of AT1G60380. A comprehensive analysis of NAC family transcription factors was recently published by Ooka et al. (2003) but did not include G1463. G1463 and G1462 are both tightly clustered to three other genes (G1461, G1464, and G1465) in a phylogenetic alignment and most likely arose through tandem gene duplication events.

[0457] Discoveries in Arabidopsis. The function of G1463 was analyzed using transgenic plants in which the gene was expressed under the control of the 35S promoter. In later stage plants, overexpression of G1463 resulted in premature senescence of rosette leaves. Under continuous light conditions, the most severely affected plants started to senesce approximately 10 days earlier than wild-type controls, at around 30 days after sowing. Additionally, 35S::G1463 plants formed slightly thin inflorescence stems and showed a relatively low seed yield.

[0458] G1463 expression was analyzed by transcriptional profiling using microarrays. In experiments where Arabidopsis seedlings (ecotype col) were treated with a panel of stresses, G1463 transcript levels were significantly repressed in response to ABA, Methyl Jasmonate, NaCl and Cold. Although both shoot and root tissues were assayed, G1463 expression was only differentially regulated in the roots.

[0459] Discoveries in tomato. LTP1 and PG::G1463 lines had poor fruit set, thus limiting the analysis to plant size. Under the regulation of the both STM and RBCS3 promoters, significant increases in G1463-overexpressing plant size were observed. Tomato seedlings expressing G1463 under the constitutive 35S promoter were smaller than wild type controls.

[0460] A closely related paralog of G1463, G1462, revealed a significant increase in soluble solids and lycopene when expressed from the AP1 promoter.

[0461] Other related data. G1463 is highly related to four other putative paralogs. Included in these are G1461, G1462, G1464 and G1465. All genes within the G1463 clade are tightly clustered on chromosome number one suggesting that they may have originated through tandem gene duplication events. G1464 is most related to G1463 in a phylogenetic analysis. G1465 displayed alterations in compositions of leaf fatty acids in the phase I genomics screen. RT-PCR analysis of the endogenous levels of G1464 in leaves indicates that this gene could be induced by ABA, auxin, cold, drought, and salt. This transcriptional response of G1464 shows strikingly similar characteristics to G1463 transcriptional profiling in our microarray studies, suggesting that there may be some overlap in function between the two genes.

TABLE 51
Data Summary for G2425

| | Promoter summary: Avg. ± StD. (Count) | | |
|---|---|---|---|
| | Brix (g sugar/ | | |
| Promoter | 100 g sample) | Lycopene (ppm) | Volume (m³) |
| 35S | 4.79 ± NA (1) | 63.32 ± NA (1) | 0.22 ± 0.055 (3) |
| AP1 | 5.92 ± 0.417 (2) | 85.42 ± 20.195 (2) | 0.27 ± 0.064 (3) |
| AS1 | 5.19 ± NA (1) | 60.53 ± NA (1) | 0.21 ± 0.045 (3) |
| Cruciferin | 4.45 ± NA (1) | 35.72 ± NA (1) | 0.23 ± 0.022 (3) |
| LTP1 | NA | NA | 0.14 ± 0.055 (3) |
| PD | NA | NA | 0.25 ± 0.019 (3) |
| PG | 5.03 ± 0.382 (2) | 48.08 ± 9.108 (2) | 0.2 ± 0.027 (3) |
| RBCS3 | 5.05 ± 0.042 (2) | 44.77 ± 7.87 (2) | 0.5 ± 0.079 (3) |
| STM | 4.85 ± 1.073 (3) | 56.2 ± 9.72 (3) | 0.38 ± 0.162 (3) |

### G1481 (SEQ ID NO: 79 and 80)

[0462] Published background information. G1481 was identified as a gene in the sequence of the P1 clone M4I22 (Accession Number AL030978), released by the European Union Arabidopsis Sequencing Project.

[0463] Discoveries in Arabidopsis. The sequence of G1481 was experimentally determined, and the function of this gene was analyzed using transgenic plants in which G1481 was expressed under the control of the 35S promoter. 35S::G1481 plants appeared identical to controls in all assays examined.

[0464] RT-PCR analysis indicated G1481 was expressed in all tissues except shoots. G1481 was expressed at higher levels in embryonic tissue. G1481 was not significantly induced by any treatment examined using RT-PCR. Microarray experiments indicated that G1481 was induced by drought and cold.

[0465] Discoveries in tomato. The fruit Brix level under the RBCS3 promoter was higher than the highest wild type level and ranked in the 95th percentile among all Brix measurements. STM::G1481 fruits also showed higher soluble solids than controls (above 75th percentile). These data indicate that G1481 may be an important regulator affecting soluble solids in tomato fruit.

[0466] Other related data. The paralog of G1481, G900, was tested in tomato in the present field trial. Overexpression of G900 under the 35S promoter in Arabidopsis produced a range of effects on growth and development, including small, slow growing plants with rather narrow dark green leaves. Later, these plants developed somewhat thin inflorescence stems and had a relatively low seed yield. Overexpression of G900 in tomato under the STM promoter also produced small plants.

TABLE 52
Data Summary for G1481

| | Promoter summary: Avg. ± StD. (Count) | | |
|---|---|---|---|
| | Brix (g sugar/ | | |
| Promoter | 100 g sample) | Lycopene (ppm) | Volume (m³) |
| 35S | 5.63 ± 0.556 (3) | 53.18 ± 2.615 (3) | 0.2 ± 0.029 (3) |
| AP1 | 5.18 ± 0.329 (3) | 71.23 ± 10.794 (3) | 0.22 ± 0.05 (3) |
| LTP1 | 5.56 ± 0.332 (2) | 66.16 ± 6.901 (2) | 0.19 ± 0.025 (3) |
| PD | 5.24 ± 0.458 (3) | 63.34 ± 0.875 (3) | 0.19 ± 0.019 (3) |
| RBCS3 | 6.6 ± NA (1) | 81.03 ± NA (1) | 0.15 ± 0.069 (3) |
| STM | 6.27 ± 0.573 (2) | 78.78 ± 2.864 (2) | 0.18 ± 0.048 (3) |

### G1504 (SEQ ID NO: 81 and 82)

[0467] Published background information. G1504 was identified as a gene in the sequence of BAC AC006283, released by the Arabidopsis Genome Initiative.

[0468] Discoveries in Arabidopsis. The sequence of G1504 was experimentally determined and the function of G1504 was analyzed using transgenic plants in which G1504 was expressed under the control of the 35S promoter. Plants overexpressing G1504 appeared to be identical to controls in all assays.

[0469] RT-PCR analysis indicates that G1504 is expressed in flowers and embryos and may be slightly induced in leaves by cold, drought and osmotic stresses. This observation is not supported by microarray analysis, which shows no significant changes (p-value<0.01) in G1505 expression levels.

[0470] Discoveries in tomato. The AS1::G1504 lines had poor fruit set, thus limiting the analysis to plant size. Under the STM promoter, plant size ranked in the 95th percentile among all measurements. Overexpression of G1504 under the AS1 promoter produced only green fruit; no red fruit were obtained. Fruits of AP1::G1504 tomato plants split before maturity. These data indicate that G1504 may be an important regulator affecting plant biomass and/or fruit development.

[0471] Other related data. Two paralogs of G1504, G2442 and G2504 were not tested in tomato in the present field trial. Both 35S::G2504 and 35S::2442 plants showed no consistent differences to wild-type in all morphological and physiological analyses that were performed.

TABLE 53
Data Summary for G1504

| | Promoter summary: Avg. ± StD. (Count) | | |
|---|---|---|---|
| | Brix (g sugar/ | | |
| Promoter | 100 g sample) | Lycopene (ppm) | Volume (m³) |
| AP1 | 4.6 ± NA (1) | 84.73 ± NA (1) | 0.19 ± 0.049 (3) |
| AS1 | NA | NA | 0.23 ± 0.034 (3) |
| RBCS3 | 5.75 ± 0.711 (3) | 67.18 ± 16.545 (3) | 0.2 ± 0.044 (3) |
| STM | 5.5 ± 0.085 (3) | 66.59 ± 20.772 (3) | 0.33 ± 0.053 (3) |

### G1543 (SEQ ID NO: 83 and 84)

[0472] Published background information. G1543 corresponds to AT2G01430 and encodes a HD-ZIP class II HD protein. The gene is annotated as ATHB-17 at the TAIR site.

[0473] Discoveries in Arabidopsis. G1543 was analyzed during our Arabidopsis genomics program; overexpression of the gene produced short compact architecture, a dark coloration and an increase in leaf chlorophyll and carotenoid levels. Notably, RT-PCR experiments revealed that G1543 expression is up-regulated in response to auxin applications. The morphological phenotype, along with the expression data, might implicate G1543 as a component of a growth or developmental response to auxin. Subsequently, G1543 was found to be significantly up-regulated in response to ABA and NaCl, during microarray studies, suggesting that the gene might have a role in response pathways to abiotic stress.

[0474] Discoveries in tomato. A notable increase in biomass, as determined by measurements of plant volume, was observed in LTP1::G1543 and PG::G1543 tomato lines relative to wild type. Overall fruit-set for LTP1::G1543 and PG::G1543 was low, and thus increases in vegetative biomass may be an indirect result of a decrease in fruit-set.

[0475] Other related data. G1543 was recognized to be of particular interest during Arabidopsis studies, since 35S::G1543 lines exhibited a dark green coloration and a compact architecture. Biochemical assays reflected the changes in leaf color noted during morphological analysis; increased levels of leaf chlorophylls and carotenoids were detected in the 35S::G1543 lines. In many crops for which the vegetative portion of the plant comprises the product, increased biomass would improve yield.

[0476] There are no highly related paralogs to G1543 in the Arabidopsis genome but we have identified potential orthologs in soy, rice, and maize. These sequences include G3524 (SEQ ID NO: 341 and 342, conserved domain coordinates 60-120, conserved domain 88% identical to the conserved domain of G1543), G3490 (SEQ ID NO: 327 and 328, conserved domain coordinates 60-120, conserved domain 80% identical to the conserved domain of G1543), and G3510 (SEQ ID NO: 825 and 826, conserved domain coordinates 74-134, conserved domain 80% identical to the conserved domain of G1543).

TABLE 54
Data Summary for G1543

| | Promoter summary: Avg. ± StD. (Count) | | |
|---|---|---|---|
| | Brix (g sugar/ | | |
| Promoter | 100 g sample) | Lycopene (ppm) | Volume (m³) |
| AS1 | 5.18 ± NA (1) | 86.09 ± NA (1) | 0.3 ± 0.036 (3) |
| Cruciferin | 5.48 ± NA (1) | 83.05 ± NA (1) | 0.17 ± 0.097 (3) |
| LTP1 | NA | NA | 0.34 ± 0.102 (3) |
| PG | 4.44 ± NA (1) | 68.52 ± NA (1) | 0.32 ± 0.063 (3) |
| STM | 4.66 ± NA (1) | 60 ± NA (1) | 0.21 ± 0.045 (3) |

### G1635 (SEQ ID NO: 85 and 86)

[0477] Published background information. G1635 (At5g17300) was identified in the sequence of BAC MKP11 (GenBank accession number AB005238), released by the Arabidopsis Genome Initiative.

[0478] Discoveries in Arabidopsis. The function of this gene was analyzed using transgenic plants in which G1635 was expressed under the control of the 35S promoter. Overexpression of G1635 in transgenic Arabidopsis caused numerous morphological changes, including reduced apical dominance, reduced bolt elongation, narrow rosette leaves, and poor fertility. The phenotype of these transgenic plants was wild-type in all biochemical and physiological assays performed. G1635 is expressed in all tissues of soil-grown plants tested by RT-PCR. Microarray analysis revealed that G1635 is induced by drought, ABA, mannitol, and cold treatments.

[0479] Discoveries in tomato. The fruit Brix levels under the LTP1 and PG promoters were close to the highest wild type level and ranked in the 95th percentile among all Brix measurements. In addition, under the AP1 and PD promoters, plant size ranked in the 95th percentile among all plant size measurements. The fruit lycopene level under the STM promoter was higher than the highest wild type level and ranked in the 95th percentile among all lycopene measurements. These tomato plants appeared bushier, possibly due to an increase in lateral branching. Significantly, the large plant size in the AP1::G1635 and PD::G1635 was correlated with a very high fruitset. This indicates a synergy between plant biomass and fruit-set in these lines. Similarly, the high lycopene phenotype of the STM::G1635 plants was also correlated with good fruitset.

TABLE 55
Data Summary for G1635

| | Promoter summary: Avg. ± StD. (Count) | | |
|---|---|---|---|
| | Brix (g sugar/ | | |
| Promoter | 100 g sample) | Lycopene (ppm) | Volume (m³) |
| 35S | NA | NA | 0.21 ± 0.019 (3) |
| AP1 | 5.64 ± 0.457 (3) | 53.34 ± 21.227 (3) | 0.32 ± 0.068 (3) |
| AS1 | 5.23 ± NA (1) | 58.77 ± NA (1) | 0.27 ± 0.145 (3) |
| Cruciferin | 5.55 ± NA (1) | 55.73 ± NA (1) | 0.23 ± 0.135 (3) |
| LTP1 | 6.31 ± NA (1) | 90.87 ± NA (1) | 0.2 ± 0.016 (3) |
| PD | 4.76 ± 0.522 (3) | 55.56 ± 13.367 (3) | 0.33 ± 0.203 (3) |
| PG | 6.3 ± NA (1) | 73.78 ± NA (1) | 0.21 ± 0.012 (3) |
| RBCS3 | 5.46 ± 0.29 (2) | 73.81 ± 17.501 (2) | 0.27 ± 0.041 (3) |
| STM | 5.62 ± 0.629 (2) | 121.53 ± 11.795 (2) | 0.28 ± 0.073 (3) |

### G1638 (SEQ ID NO: 87 and 88)

[0480] Published background information. G1638 (At2g38090) was identified in the sequence of BAC F16M14 (GenBank accession number AC003028), released by the Arabidopsis Genome Initiative.

[0481] Discoveries in Arabidopsis. The complete sequence of G1638 was expressed in Arabidopsis under the control of the 35S promoter. The phenotype of transgenic Arabidopsis plants overexpressing G1638 was wild-type in all assays performed. G1638 is moderately expressed in all tissues and under all conditions tested in RT-PCR experiments. Microarray experiments revealed no induction or repression patterns related to stress or hormone treatment, or in any of the transcription factor overexpressing lines.

[0482] Discoveries in tomato. The fruit lycopene level in PG::G1638 plants was higher than the highest wild type level and ranked in the 95th percentile among all lycopene measurements.

TABLE 56
Data Summary for G1638

| | Promoter summary: Avg. ± StD. (Count) | | |
|---|---|---|---|
| | Brix (g sugar/ | | |
| Promoter | 100 g sample) | Lycopene (ppm) | Volume (m³) |
| 35S | NA | NA | 0.16 ± 0.038 (3) |
| Cruciferin | 4.59 ± NA (1) | 43.54 ± NA (1) | 0.29 ± 0.023 (3) |
| LTP1 | NA | NA | 0.16 ± 0.015 (3) |
| PD | 5.29 ± 0.382 (2) | 53.51 ± 6.378 (2) | 0.27 ± 0.094 (3) |
| PG | 5.86 ± 0.141 (2) | 119.22 ± 7.446 (2) | 0.23 ± 0.002 (2) |
| STM | 5.17 ± NA (1) | 58.99 ± NA (1) | 0.28 ± 0.119 (2) |

### G1640 (SEQ ID NO: 89 and 90)

[0483] Published background information. G1640 (At5g49330) was identified in the sequence of BAC K21P3 (GenBank accession number AB016872), released by the Arabidopsis Genome Initiative. This gene has since been given the name AtMYB111 by Stracke et. al. (2001).

[0484] Discoveries in Arabidopsis. The function of this gene was analyzed using transgenic plants in which G1640 was expressed under the control of the 35S promoter. The transgenic plants were morphologically indistinguishable from wild-type plants. They were wild-type in all physiological assays performed. Biochemical analysis suggests that overexpression of G1640 in Arabidopsis results in an increase in seed oil content and a decrease in seed protein content, at least in one of the three lines analyzed. This result should be repeated on additional lines and in additional seed lots.

[0485] As determined by RT-PCR, G1640 was expressed in leaves, flowers, embryos and siliques. No expression of G1640 was detected in the other tissues tested nor was the gene induced in rosette leaves by any stress-related treatment, as determined by RT-PCR. Microarray analysis showed that G1640 may be induced by cold treatment and slightly repressed by ABA.

[0486] Discoveries in tomato. The plant size under the PG promoter was close to the highest wild type level and ranked in the 95th percentile among all biomass measurements. PG::G1640 plants had low fruit-set.

TABLE 57
Data Summary for G1640

| | Promoter summary: Avg. ± StD. (Count) | | |
|---|---|---|---|
| | Brix (g sugar/ | | |
| Promoter | 100 g sample) | Lycopene (ppm) | Volume (m³) |
| 35S | 5.48 ± NA (1) | 69.86 ± NA (1) | 0.23 ± 0.177 (3) |
| AS1 | 6.19 ± 0.481 (2) | 67.68 ± 12.735 (2) | 0.34 ± 0.126 (3) |
| Cruciferin | 6.08 ± 0.539 (3) | 94.61 ± 22.549 (3) | 0.29 ± 0.097 (3) |
| PG | NA | NA | 0.28 ± 0.098 (3) |

### G1645 (SEQ ID NO: 91 and 92)

[0487] Published background information. G1645 (At1g26780) is a member of the (R1)R2R3 subfamily of MYB transcription factors. G1645 was identified in the sequence of BAC T24P13 (GenBank accession number AC006535), released by the Arabidopsis Genome Initiative. This gene has since been given the name AtMYB117 by Stracke et. al. (2001).

[0488] Discoveries in Arabidopsis. The function of G1645 was analyzed using transgenic Arabidopsis plants in which the gene was expressed under the control of the 35S promoter. Overexpression of G1645 produced marked changes in Arabidopsis leaf, flower, and shoot development. These effects were observed, to varying extents, in the majority of 35S::G1645 primary transformants.

[0489] At early stages, many 35S::G1645 T1 lines appeared slightly small and most had rather rounded leaves. However, later, as the leaves expanded, in many cases they became misshapen and highly contorted. Furthermore, some of the lines grew slowly and bolted markedly later than control plants. Following the switch to flowering, 35S::G1645 inflorescences often showed aberrant growth patterns, and had a reduction in apical dominance. Additionally, the flowers were frequently abnormal and had organs missing, reduced in size, or contorted. Pollen production also appeared poor in some instances. Due to these deficiencies, the fertility of many of the 35S::G1645 lines was low and only small numbers of seeds were produced.

[0490] Since 35S::G1645 primary transformants were obtained at a late stage in the research program, and many of the T1 lines developed slowly, therefore physiological assays were performed on the individual lines only. Overexpression of G1645 resulted in a low germination efficiency during a 32° C. heat stress assay.

[0491] As determined by RT-PCR, G1645 is expressed in flowers, embryos, germinating seeds, and siliques. No expression of G1645 was detected in the other tissues tested. G1645 expression appeared to be repressed in rosette leaves infected with Erysiphe orontii. No significant increases or decreases in G1645 expression were detected in any of the microarray experiments.

[0492] Discoveries in tomato. The fruit Brix level under the PG promoter was close to the highest wild type level and ranked in the 95th percentile among all Brix measurements. However, the high Brix measurements in PG::G1645 plants were correlated with a very low fruit-set.

[0493] Other related data. The paralog of G1645, G2424, was not tested in tomato in the present field trial. Similar to G1645 overexpression, constitutive expression of G2424 produced a spectrum of developmental abnormalities and poor fertility in Arabidopsis. An increase in leaf stigmastanol was observed in two independent T2 lines.

TABLE 58
Data Summary for G1645

| | Promoter summary: Avg. ± StD. (Count) | | |
|---|---|---|---|
| | Brix (g sugar/ | | |
| Promoter | 100 g sample) | Lycopene (ppm) | Volume (m³) |
| 35S | 4.44 ± NA (1) | 46.17 ± NA (1) | 0.13 ± 0.044 (3) |
| AP1 | 5.42 ± 0.474 (2) | 71.97 ± 12.028 (2) | 0.29 ± 0.046 (2) |
| AS1 | NA | NA | 0.07 ± NA (1) |
| Cruciferin | NA | NA | 0.18 ± 0 (2) |
| LTP1 | 5.27 ± 0.339 (2) | 83.72 ± 4.78 (2) | 0.17 ± 0.011 (2) |
| PD | 4.92 ± 0.247 (2) | 47.86 ± 17.197 (2) | 0.16 ± 0.027 (2) |
| PG | 6.33 ± NA (1) | 66.65 ± NA (1) | 0.21 ± 0.012 (2) |
| STM | 5.1 ± NA (1) | 77.38 ± NA (1) | 0.17 ± NA (1) |

### G1650 (SEQ ID NO: 93 and 94)

[0494] Published background information. G1650 has been identified in the sequence of a BAC clone from chromosome 4 (BAC clone F16A16, gene F16A16.100, GenBank accession number AL035353). Heim et al. (2003) and Toledo-Ortiz et al. (2003) identified G1650 as AtbHLH023.

[0495] Discoveries in Arabidopsis. Overexpressors of G1650 under control of the 35S promoter had normal morphological and physiological characteristics.

[0496] None of the stress challenge array background experiments revealed any regulation of G1650 expression.

[0497] Discoveries in tomato. Plant volume was greater than that in wild type controls in plants expressing G1650 under the AP1 promoter, with a rank in the 95th percentile among all measurements. Brix was greater than that in wild type controls in plants expressing G1650 under the LTP1 promoter, with a rank in the 95th percentile among all measurements.

TABLE 59
Data Summary for G1650

| | Promoter summary: Avg. ± StD. (Count) | | |
|---|---|---|---|
| | Brix (g sugar/ | | |
| Promoter | 100 g sample) | Lycopene (ppm) | Volume (m³) |
| 35S | 5.62 ± NA (1) | 50.61 ± NA (1) | 0.18 ± 0.063 (3) |
| AP1 | 5.93 ± NA (1) | 52.21 ± NA (1) | 0.32 ± 0.19 (3) |
| AS1 | 5.49 ± 0.608 (3) | 53.74 ± 8.962 (3) | 0.29 ± 0.02 (3) |
| Cruciferin | 5.35 ± 0.618 (3) | 46.03 ± 23.883 (3) | 0.26 ± 0.043 (3) |
| LTPl | 6.38 ± 0.142 (3) | 84.95 ± 22.889 (3) | 0.19 ± 0.061 (3) |
| PD | 4.79 ± NA (1) | 47.07 ± NA (1) | 0.27 ± 0.034 (3) |
| PG | 5.39 ± NA (1) | 35.24 ± NA (1) | 0.15 ± 0.05 (3) |
| RBCS3 | 5.69 ± 0.085 (2) | 81.27 ± 1.704 (2) | 0.27 ± 0.023 (3) |
| STM | 5.43 ± 0.401 (3) | 66.19 ± 18.96 (3) | 0.31 ± 0.15 (3) |

### G1659 (SEQ ID NO: 95 and 96)

[0498] Published background information: The sequence of G1659 (AT4G00670) was obtained from Arabidopsis genomic sequencing project, GenBank accession number AF058919, based on its sequence similarity within the conserved domain to other DBP related proteins in Arabidopsis. To date, there is no published information regarding the functions of this gene.

[0499] Discoveries in Arabidopsis. The function of G1659 was studied in Arabidopsis using transgenic plants in which the gene was expressed under the control of the 35S promoter. 35S::G1659 plants were wild-type in morphology and development, as well as in the physiological and biochemical analyses that were performed.

[0500] RT-PCR analysis of G1659 shows expression at low to moderate levels throughout the plant and is induced by auxin, ABA, heat, salt and drought. In a soil drought microarray experiment, G1659 was found to be repressed in Arabidopsis leaves at multiple stages of drought stress. Repression levels correlated with the severity of drought, and expression began to recover after rewatering. In a microarray study of ABA treated plants G1659 was found to be up regulated in shoots but down regulated in roots. G1659 was also found to be repressed in roots in the salicylic acid (400 μM), stress avg. mannitol (400 mM), and stress avg. NaCl (200 mM) microarray experiments.

[0501] Discoveries in tomato. Lycopene content in fruit was greater than in wild type controls, in plants expressing G1659 under the control of the Cruciferin, AS1, and STM promoters, and ranked in the 90th percentile among all measurements.

[0502] Transgenic plants expressing G1659 under the control of the Cruciferin, AS1, and STM promoters also showed morphological differences to controls. Plants expressing G1659 with the Cruciferin and STM promoters were noted to have a heavy late fruitset. Plants expressing G1659 under the control of the AS1 promoter, however, had a very heavy fruit-set that was not delayed. The combination of high lycopene with heavy fruit-set seen with different promoters in combination with G1659 is highly desirable.

TABLE 60
Data Summary for G1659

| | Promoter summary: Avg. ± StD. (Count) | | |
|---|---|---|---|
| | Brix (g sugar/ | | |
| Promoter | 100 g sample) | Lycopene (ppm) | Volume (m³) |
| AP1 | 5.82 ± 0.423 (3) | 70.69 ± 4.675 (3) | 0.2 ± 0.047 (3) |
| AS1 | 5.71 ± 0.126 (3) | 91.49 ± 10.288 (3) | 0.17 ± 0.022 (3) |
| Cruciferin | 5.86 ± 0.417 (2) | 90.41 ± 10.932 (2) | 0.16 ± 0.029 (3) |
| LTP1 | NA | NA | 0.17 ± 0 (2) |
| PD | 5.14 ± 0.675 (3) | 66.74 ± 14.982 (3) | 0.27 ± 0.044 (3) |
| PG | 5.36 ± 0.092 (2) | 42.91 ± 1.245 (2) | 0.19 ± 0.012 (2) |
| STM | 5.36 ± NA (1) | 90.45 ± NA (1) | 0.13 ± 0.02 (3) |

### G1752 (SEQ ID NO: 97 and 98)

[0503] Published background information. G1752, also designated AtERF15, corresponds to gene At2g31230 (AAD20668). Sakuma et al. (2002) categorized G1752 into the B3 subgroup of the AP2 transcription factor family, with the B family having only a single AP2 domain. G1752 is closely related to ERF1 (G1266), whose overexpression has been shown to confer multi-pathogen resistance on Arabidopsis (Berrocal-Lobo et al. (2002)).

[0504] Discoveries in Arabidopsis. The majority of 35S::G1752 Arabidopsis transformants were extremely small, with curled dark leaves, and were slow growing compared to controls. The most severely affected individuals arrested development at an early stage, and failed to flower.

[0505] In a series of microarray experiments with hormone and stress treatments, G1752 was found to be up-regulated by ACC treatment in roots after 24 hours, and repressed dramatically by drought treatment in leaves.

[0506] Discoveries in tomato. Plant size was greater than that in wild type controls in plants expressing G1752 under the 35S, Cruciferin and PG promoters, with a rank in the 95th percentile among all measurements. Increased plant size in the Cruciferin::G1752 plants was correlated with a good fruit-set. In contrast, seedlings expressing G1752 under the 35S promoter had reduced size and wrinkled leaves. Plant size was also dramatically reduced upon overexpression of G1752 with the 35S promoter in Arabidopsis.

[0507] Other related data. G2512, the paralog of G1752 was not in the field trial.

TABLE 61
Data Summary for G1752

| | Promoter summary: Avg. ± StD. (Count) | | |
|---|---|---|---|
| | Brix (g sugar/ | | |
| Promoter | 100 g sample) | Lycopene (ppm) | Volume (m³) |
| 35S | 4.86 ± 0.255 (3) | 31.17 ± 12.577 (3) | 0.33 ± 0.031 (3) |
| AP1 | 5.45 ± 0.389 (2) | 56.07 ± 22.019 (2) | 0.29 ± 0.045 (3) |
| AS1 | 5.68 ± NA (1) | 68.27 ± NA (1) | 0.23 ± NA (1) |
| Cruciferin | 5.43 ± 0.633 (3) | 38.33 ± 3.143 (3) | 0.39 ± 0.076 (3) |
| PG | 5.6 ± 0.904 (3) | 81.6 ± 4.384 (3) | 0.33 ± 0.101 (3) |
| RBCS3 | 4.86 ± 0.495 (2) | 67.34 ± 32.294 (2) | 0.23 ± 0.01 (3) |
| STM | NA | NA | 0.2 ± 0.044 (3) |

### G1755 (SEQ ID NO: 99 and 100)

[0508] Published background information. G1755 was identified in the sequence of BAC T3G21; it corresponds to gene At2g40350 (GenBank PID AAD25670). Sakuma et al. (2002) categorized G1755 into the AZ subgroup of the AP2 transcription factor family, with the A family related to the DREB and CBF genes, and G1755 relatively closely related to the DREB2 group.

[0509] Discoveries in Arabidopsis. Overexpression of G1755 under control of the 35S promoter in Arabidopsis resulted in plants that had normal morphology at all developmental stages and normal physiological responses in all assays.

[0510] In a series of microarray experiments with hormone and stress treatments, G1755 was not found to be regulated.

[0511] Discoveries in tomato. Plant volume was greater than that in wild type controls in plants expressing G1755 under the PD and PG promoters, with a rank in the 95th percentile among all measurements. Brix was greater than that in wild type controls in plants expressing G1755 under the AP1 and PD promoters, with a rank in the 95th percentile among all measurements. Lycopene content was greater than that in wild type controls in plants expressing G1755 under the PD promoter, with a rank in the 95th percentile among all measurements. Overexpression of G1755 under the 35S promoter in seedlings yielded plants with reduced size and darker green leaves. Overexpression of G1755 with the 35S promoter in Arabidopsis produced plants with normal morphology and physiology. The ability of G1755 to impact Brix, lycopene and volume, with all three affected by overexpression with the phytoene desaturase promoter, may have significant commercial value.

[0512] The increase in Brix levels in the AP1::G1755 plants was correlated with good fruit-set. However the increased volume seen in the PG::G1755 plants was associated with low fruit-set.

[0513] Other related data. G1754, a paralog of G1755 was not in the field trial.

TABLE 62
Data Summary for G1755

| | Promoter summary: Avg. ± StD. (Count) | | |
|---|---|---|---|
| | Brix (g sugar/ | | |
| Promoter | 100 g sample) | Lycopene (ppm) | Volume (m³) |
| 35S | 5.62 ± 0.304 (2) | 56.16 ± 16.603 (2) | 0.23 ± 0.059 (3) |
| AP1 | 6.67 ± 0.3 (3) | 86.05 ± 58.789 (3) | 0.22 ± 0.069 (3) |
| AS1 | 5.62 ± NA (1) | 65.76 ± NA (1) | 0.11 ± 0.076 (3) |
| Cruciferin | 5.91 ± 0.475 (3) | 64.32 ± 34.528 (3) | 0.18 ± 0.051 (3) |
| LTPl | NA | NA | 0.18 ± 0.047 (2) |
| PD | 6.65 ± 0.375 (2) | 102.03 ± 6.201 (2) | 0.33 ± 0.026 (3) |
| PG | 5.61 ± 0.247 (2) | 54.75 ± 6.753 (2) | 0.32 ± 0.13 (3) |

### G1784 (SEQ ID NO: 101 and 102)

[0514] Published background information. G1784 (At2g02030) is a member of the putative myb-related gene family. G1784 was identified as part of BAC F14H20 (GenBank accession number AC006532), released by the Arabidopsis Genome sequencing project.

[0515] Discoveries in Arabidopsis. The function of this gene was analyzed using transgenic plants in which G1784 was expressed under the control of the 35S promoter. The phenotype of these transgenic plants was wild-type in all assays performed. G1784 appears to be expressed primarily in germinating seeds. The expression of G1784 is not induced in rosette leaves by any stress-related treatments tested, based on RT-PCR and microarray analyses.

[0516] Discoveries in tomato. The fruit Brix level under the Cruciferin promoter was close to the highest wild type level and ranked in the 95th percentile among all Brix measurements. The LTP1 promoter also produced an above average Brix level, but not in the 95th percentile.

TABLE 63
Data Summary for G1784

| | Promoter summary: Avg. ± StD. (Count) | | |
|---|---|---|---|
| | Brix (g sugar/ | | |
| Promoter | 100 g sample) | Lycopene (ppm) | Volume (m³) |
| Cruciferin | 6.36 ± 0.467 (2) | 85.65 ± 19.361 (2) | 0.2 ± 0.062 (3) |
| LTP1 | 6.13 ± NA (1) | 46.02 ± NA (1) | 0.22 ± 0.046 (3) |
| PG | NA | NA | 0.15 ± 0.084 (3) |
| RBCS3 | 4.52 ± 0.841 (2) | 76.23 ± 18.307 (2) | 0.12 ± 0.013 (3) |
| STM | 5.53 ± 0.576 (3) | 54.55 ± 22.338 (3) | 0.18 ± 0.017 (3) |

### G1785 (SEQ ID NO: 103 and 104)

[0517] Published background information. G1785 corresponds to gene AT2g25230, and it has also been described as AtMYB100 (Stracke et al. (2001)).

[0518] Discoveries in Arabidopsis. G1785 was studied in a knockout mutant (T-DNA insertion) and overexpressing lines in Arabidopsis. For both the knockout and the overexpressing lines, there were no consistent differences in morphology compared to wild-type controls and the plants were wild-type in the physiological analyses that were performed. RT-PCR analysis of the endogenous levels of G1785 indicates that this gene is primarily expressed in embryos. No expression is detected in leaf tissue under any stress-related condition tested, as determined by RT-PCR and microarray experiments.

[0519] Overexpression of G248 in Arabidopsis was found to confer greater sensitivity to disease, particularly following infection by Botrytis cinerea.

[0520] Discoveries in tomato. The fruit Brix level under the STM promoter was very close to the highest wild type level and ranked in the 95th percentile among all Brix measurements. The volume of these plants was smaller than average.

[0521] Other related data. The paralog of G1785, G248, was not tested in tomato in the present field trial.

TABLE 64
Data Summary for G1785

| | Promoter summary: Avg. ± StD. (Count) | | |
|---|---|---|---|
| | Brix (g sugar/ | | |
| Promoter | 100 g sample) | Lycopene (ppm) | Volume (m³) |
| AP1 | 5.67 ± 0.116 (3) | 42.98 ± 5.376 (3) | 0.11 ± 0.02 (3) |
| Cruciferin | 5.62 ± 0.177 (2) | 76.19 ± 10.09 (2) | 0.17 ± 0.037 (3) |
| PD | NA | NA | 0.12 ± 0.049 (3) |
| STM | 6.44 ± NA (1) | 42.91 ± NA (1) | 0.09 ± 0.03 (3) |

### G1791 (SEQ ID NO: 105 and 106)

[0522] Published background information. G1791 corresponds to gene K14B15.13 (BAA95735). Sakuma et al. (2002) categorized G1791 into the B3 subgroup of the AP2 transcription factor family, with the B family containing one AP2 DNA binding domain.

[0523] Discoveries in Arabidopsis. Overexpression of G1791 severely retarded growth and development. This phenotype was 100% penetrant across 35 independent T1 lines. 35S::G1791 plants were extremely tiny, slow growing, and formed dark green leaves. All lines were completely sterile and many arrested growth without initiating flower buds. In other lines, a few vestigial flower buds were noted, but very little inflorescence extension occurred, and these structures senesced without producing seed.

[0524] None of the stress challenge array background experiments revealed any regulation of G1791 expression.

[0525] Discoveries in tomato. Brix level in fruit was greater than that in wild type controls in plants expressing G1791 under the PG promoter, with a rank in the 95th percentile among all measurements. Fruit-set for PG::G1791 plants was low, and the potential relationship of this low fruit set on Brix measurements remains to be determined.

[0526] Plant size was dramatically reduced upon overexpression of G1791 with the 35S promoter in Arabidopsis. G1791 is a paralog of G1792, and both of these genes have been found to confer disease resistance on Arabidopsis overexpressors. The interaction between Brix and disease resistance bears further investigation, in terms of the basis for Brix increase in these lines, as alterations in cell wall synthesis, which could be related to an increased Brix, have been linked with disease resistance (e.g., Ellis et al. (2002)).

[0527] Other related data. G1791 paralog of G1792, and both of these genes have been found to confer disease resistance on Arabidopsis overexpressors. The interaction between Brix and disease resistance bears further investigation, in terms of the basis for Brix increase in these lines, as alterations in cell wall synthesis, which could be related to an increased Brix, have been linked with disease resistance (e.g., Ellis et al. (2002)). G1791 was not analyzed in the present field trial ATP field trial.

TABLE 65
Data Summary for G1791

| | Promoter summary: Avg. ± StD. (Count) | | |
|---|---|---|---|
| | Brix (g sugar/ | | |
| Promoter | 100 g sample) | Lycopene (ppm) | Volume (m³) |
| Cruciferin | 5.19 ± 0.601 (2) | 35.89 ± 9.899 (2) | 0.19 ± 0.087 (3) |
| LTP1 | 5.11 ± NA (1) | 76.79 ± NA (1) | 0.13 ± 0.057 (3) |
| PG | 6.48 ± NA (1) | 83.06 ± NA (1) | 0.14 ± 0.064 (2) |
| RBCS3 | 5.36 ± 0.134 (2) | 59.25 ± 7.913 (2) | 0.17 ± 0.041 (3) |

### G1808 (SEQ ID NO: 107 and 108)

[0528] Published background information. G1808 (At4g37730) was identified as part of the BAC clone T28119, GenBank accession number AL035709 (nid=4490717). G1808 is equivalent to AtbZIP7, a member of subgroup S (Jakoby et al. (2002)). Some genes of bZIP subgroup S contain 5′-upstream ORFs (uORFs) that are involved in post-transcriptional repression by sucrose. No published information on the function of G1808 is available.

[0529] Discoveries in Arabidopsis. G1808 appears to be constitutively expressed in all tissues and environmental conditions tested. However, gene chip experiment showed that G1808 is induced by drought, ABA, JA and SA. The annotation of G1808 in BAC ATT28I19 was experimentally determined. A line homozygous for a T-DNA insertion in G1808 was initially used to determine the function of this gene. The T-DNA insertion of G1808 is approximately 140 nucleotides after the ATG in coding sequence and therefore is likely to result in a null mutation. The phenotype of these transgenic plants was wild-type in all assays performed. Subsequently, the function of G1808 was studied by overexpression of the genomic DNA for the gene under control of the 35S promoter in transgenic plants. Overexpression of G1808 resulted in major growth abnormalities including reduced size, and changes in flower development. G1808 overexpressing lines showed reduced seedling size and vigor in the cold germination assay. Based on the germination controls this was not due to an overall reduced seedling germination and growth. The same phenotype was observed for overexpression of G2070, another bZIP transcription factor, suggesting redundancy of gene function.

[0530] Arabidopsis lines overexpressing G1047, a paralog of G1808, were more tolerant to infection with a moderate dose of the fungal pathogen Fusarium oxyporum.

[0531] Discoveries in tomato. The fruit Brix level under the RBCS3 promoter was close to the highest wild type level and ranked above the 95th percentile among all Brix measurements. The paralog of G1808, G1047, was not tested in tomato in the present field trial.

[0532] Other related data. The paralog of G1808, G1047, was not tested in tomato in the present field trial. In Arabidopsis, lines with overexpression of G1047 were more tolerant to infection with a moderate dose of the fungal pathogen Fusarium oxysporum.

TABLE 66
Data Summary for G1808

| | Promoter summary: Avg. ± StD. (Count) | | |
|---|---|---|---|
| | Brix (g sugar/ | | |
| Promoter | 100 g sample) | Lycopene (ppm) | Volume (m³) |
| 35S | 6.13 ± NA (1) | 91.06 ± NA (1) | 0.16 ± 0.066 (3) |
| AS1 | 5.87 ± 0.468 (3) | 83.56 ± 11.824 (3) | 0.2 ± 0.011 (3) |
| LTP1 | 5.66 ± NA (1) | 59.03 ± NA (1) | 0.17 ± 0.042 (3) |
| RBCS3 | 6.42 ± 0.12 (2) | 80.44 ± 31.176 (2) | 0.2 ± 0.062 (3) |

### G1809 (SEQ ID NO: 109 and 110)

[0533] Published background information. G1809 was identified in the sequence of BAC MKP6, GenBank accession number AB022219, released by the Arabidopsis Genome Initiative.

[0534] Discoveries in Arabidopsis. The function of this gene was analyzed using transgenic plants in which G1809 was expressed under the control of the 35S promoter. The phenotype of these transgenic plants was wild-type in all assays performed. G1809 appears to be constitutively expressed in all tissues and environmental conditions tested.

[0535] Discoveries in tomato. The fruit Brix level under the LTP1 promoter is higher than the highest wild type level and ranked above the 95th percentile among all Brix measurements. There are no apparent paralogs of G1808. Arabidopsis lines overexpressing G1809 produced wild-type phenotypes in all assays performed.

TABLE 67
Data Summary for G1809

| | Promoter summary: Avg. ± StD. (Count) | | |
|---|---|---|---|
| | Brix (g sugar/ | | |
| Promoter | 100 g sample) | Lycopene (ppm) | Volume (m³) |
| 35S | 5.65 ± NA (1) | 37 ± NA (1) | 0.28 ± 0.025 (3) |
| Cruciferin | 4.87 ± NA (1) | 59.1 ± NA (1) | 0.25 ± 0.04 (3) |
| LTP1 | 6.51 ± NA (1) | 87.11 ± NA (1) | 0.25 ± 0.042 (3) |
| PG | 6.19 ± NA (1) | 84.97 ± NA (1) | 0.22 ± 0.08 (3) |

### G1815 (SEQ ID NO: 111 and 112)

[0536] Published background information. G1815 (At3g29020) was identified in the sequence of TAC clone:K5K13 (GenBank accession number AB025615), released by the Arabidopsis Genome Initiative, and is also referred to as AtYB110 (Stracke et al, 2001).

[0537] Discoveries in Arabidopsis. The function of G1815 was analyzed using transgenic Arabidopsis plants in which the gene was expressed under the control of the 35S promoter. The phenotype of the 35S::G1815 transgenics was wild-type in morphology, and wild-type with respect to their response to biochemical and physiological analyses.

[0538] RT-PCR analysis of the endogenous levels of G1815 indicates that this gene is expressed at low levels mainly in flower tissue. In leaf tissue, G1815 is induced in response to a variety of stress-related conditions, as detected by RT-PCR. Microarray analysis did not show any significant changes in G1815 expression due to the stress treatments, hormone treatments, or overexpression of any of the tested transcription factors.

[0539] Discoveries in tomato. In tomatoes overexpressing G1815 under the control of the 35S promoter, plant size was close to the highest wild type level and ranked in the 95th percentile among all volume measurements. The leaf edges of these plants were curled. In Arabidopsis, the phenotype of the 35S::G1815 transgenics was wild-type in morphology, and wild-type with respect to their response to biochemical and physiological analyses.

TABLE 68
Data Summary for G18155

| | Promoter summary: Avg. ± StD. (Count) | | |
|---|---|---|---|
| | Brix (g sugar/ | | |
| Promoter | 100 g sample) | Lycopene (ppm) | Volume (m³) |
| | 5.43 ± 0.512 (3) | 60.35 ± 16.104 (3) | 0.35 ± 0.14 (3) |
| AP1 | NA | NA | 0.17 ± 0.042 (2) |
| AS1 | NA | NA | 0.18 ± 0.05 (3) |
| Cruciferin | 5.86 ± 0.163 (2) | 41.7 ± 13.343 (2) | 0.2 ± 0.028 (3) |
| PD | 5.47 ± 0.538 (3) | 55.35 ± 24.251 (3) | 0.18 ± 0.045 (3) |
| PG | 5.43 ± 0.778 (2) | 70.44 ± 1.365 (2) | 0.19 ± 0.059 (2) |
| STM | 5.79 ± 0.46 (3) | 65.75 ± 4.052 (3) | 0.2 ± 0.05 (3) |

### G1865 (SEQ ID NO: 113 and 114)

[0540] Published background information. The sequence of G1865 (At2g06200) was initially obtained from the Arabidopsis sequencing project, GenBank accession number AC006413 (GI:20197765), based on sequence similarity to the rice Growth-regulating-factor1 (GRF1, GI: 6573149; Knaap et al. (2000)). Nine of the ten members of the Arabidopsis AtGRF family were recently published by Kim et al. (2003)), including G1865 referred as AtGRF6. Their functional analysis of the gene family did not include G1865.

[0541] Discoveries in Arabidopsis. The function of G1865 was analyzed through its ectopic overexpression in plants. The analysis of the endogenous level of G1865 transcripts by RT-PCR revealed a predominant expression in roots, flowers, embryo and siliques, with very little expression in shoots and rosette leaves, in agreement with northern blot analysis (Kim et al. (2003)). In addition, G1865 expression was repressed in response to cold, heat and in interaction with Fusarium oxysporum and Erysiphe orontii. Microarray analysis revealed no significant (p-value<0.01) in G1865. The function of G865 was analyzed by ectopic overexpression in Arabidopsis. 35S::G1865 transgenic Arabidopsis displayed rounded, dark green leaves, with short petioles, and were smaller than controls at early stages of development. Overexpression of G1865 markedly delayed the onset of flowering. Several lines exhibited such effects and all showed a distinct delay in bolting, producing a greatly increased number leaves; the most extreme individuals formed visible flower buds around a month after wild type (continuous light conditions), by which time rosette leaves had become rather large and contorted.

[0542] Discoveries in tomato. Transgenic tomatoes expressing G1865 under the seed (cruciferin) promoter were significantly larger than wild type controls; ranking among the 95th percentile of all volumetric measurements. Similarly, but to a lesser extent, overexpression of G1865 under the meristem (AS1) and flower (AP1) promoters results in transgenic tomato plants larger than wild-type (90th percentile). Transgenic AP1::G1865 tomato plants also produced many more fruits than wild-type control plants.

[0543] 35S::G1865 transgenic Arabidopsis displayed rounded, dark green leaves, with short petioles, and were smaller than controls at early stages of development. Overexpression of G1865 markedly delayed the onset of flowering.

[0544] Other related data. The phenotype observed in 35S::G1865 plants is similar to results obtained by Knaap et al. (2000) when overexpressing the rice Os-GRF1 in Arabidopsis. Transgenic plants showed a comparable late bolting phenotype that could be partially rescued by external application of gibberellic acid to the plant. This result suggests that G1865 is a functional ortholog of the rice Os-GRF1 in Arabidopsis, but has significant differences in expression pattern. The Os-GRF1 is found to be specifically expressed in intercalary meristem of deepwater rice, while G1865 is expressed in all tissues except shoots and rosette leaves where expression in almost absent. G1865 may play an important role in GA-response, and in regulation of cell elongation.

TABLE 69
Data Summary for G1865

| | Promoter summary: Avg. ± StD. (Count) | | |
|---|---|---|---|
| | Brix (g sugar/ | | |
| Promoter | 100 g sample) | Lycopene (ppm) | Volume (m³) |
| AP1 | 5.32 ± 0.855 (3) | 96.35 ± 21.847 (3) | 0.29 ± 0.021 (3) |
| AS1 | 5.11 ± NA (1) | 75.58 ± NA (1) | 0.27 ± 0.025 (3) |
| Cruciferin | 4.74 ± NA (1) | 54.71 ± NA (1) | 0.32 ± 0.049 (3) |

### G1884 (SEQ ID NO: 115 and 116)

[0545] Published background information. G1884 was identified as a gene in the sequence of BAC clone F20D10 (Accession Number AL035538), released by the European Union Arabidopsis Sequencing Project. A partial sequence of G1884 is found in the sequence of the EST FB026h08F (Accession Number AV531601), which was obtained from a cDNA library derived from Arabidopsis flower buds. No further information is available concerning the function of this gene.

[0546] Discoveries in Arabidopsis. The sequence of G1884 was experimentally determined and the function of this gene was analyzed using transgenic plants in which G1884 was expressed under the control of the 35S promoter. Overexpression of G1884 produced deleterious effects on Arabidopsis growth and development. No transformants were obtained during the first two selection attempts on T0 seeds, suggesting that the gene might have lethal effects. However, a small number of transformants were finally obtained from a third and fourth batch of T0 seed (RT-PCR confirmed that these lines displayed high levels of G1884 overexpression). These 35S::G1884 plants were uniformly much smaller than wild-type controls throughout development. Following the switch to flowering, the inflorescences from these lines were very poorly developed and produced very few, if any, seeds. RT-PCR analysis indicates that G1884 is expressed at low levels in flowers and rosette leaves, and at higher levels in embryos and siliques, which suggests a role for this gene in embryo or early seedling development and is slightly induced by osmotic stress. Microarray analysis indicates that G1884 is induced by SA.

[0547] Discoveries in tomato. The fruit lycopene level under the LTP1 promoter was above the highest wild type levels and ranked in the 95th percentile among all measurements.

TABLE 70
Data Summary for G1884

| | Promoter summary: Avg. ± StD. (Count) | | |
|---|---|---|---|
| | Brix (g sugar/ | | |
| Promoter | 100 g sample) | Lycopene (ppm) | Volume (m³) |
| AP1 | 5.33 ± 0.191 (2) | 66.69 ± 37.342 (2) | 0.18 ± 0.124 (3) |
| AS1 | 5.64 ± 0.41 (2) | 68.84 ± 2.468 (2) | 0.24 ± 0.075 (2) |
| Cruciferin | 5.95 ± NA (1) | 53.32 ± NA (1) | 0.16 ± 0.015 (3) |
| LTP1 | 6.2 ± 0.184 (2) | 108.76 ± 6.746 (2) | 0.15 ± 0.027 (2) |
| PD | 5 ± 0.548 (3) | 60.24 ± 5.295 (3) | 0.21 ± 0.112 (3) |
| RBCS3 | 5.36 ± NA (1) | 39.89 ± NA (1) | 0.14 ± 0.159 (2) |
| STM | 5.18 ± 0.354 (2) | 57.2 ± 9.504 (2) | 0.19 ± 0.018 (2) |

### G1895 (SEQ ID NO: 117 and 118)

[0548] Published background information. G1895 was identified as a gene in the sequence of the BAC T24P13 (Accession Number AC006535), released by the Arabidopsis thaliana Genome Center. No further published information about the function of G1895 is available.

[0549] Discoveries in Arabidopsis. The function of G1895 was analyzed using transgenic plants in which G1895 was expressed under the control of the 35S promoter. Overexpression of G1895 delayed the onset of flowering in Arabidopsis by around 2-3 weeks under continuous light conditions, although this phenotype was observed only at low frequency. In all other physiological and biochemical assays, 35S::G1895 plants appeared identical to controls. RT-PCR analysis indicates G1895 was expressed in all tissues and the highest levels of expression were found in flowers, rosette leaves, and embryos. In rosette leaves using RT-PCR, G1895 appears to be induced by auxin, ABA, and by cold stress. Microarray analysis confirmed the induction of G1895 by cold stress.

[0550] Discoveries in tomato. Under the AP1 and AS1 promoters, plant size ranked in the 95th percentile among all plant size measurements. The AP1::G1895 and AS1::G1895 plants had good fruit-set, although this trait was somewhat variable.

[0551] Other related data. A paralog of G1895, G1903, was tested in the tomato field trials in the present field trial. Significant changes in plant size (greater than the 95th percentile, was observed in LTP1::1903 and Cruciferin::G1903 tomato plants.

TABLE 71
Data Summary for G1895

| | Promoter summary: Avg. ± StD. (Count) | | |
|---|---|---|---|
| | Brix (g sugar/ | | |
| Promoter | 100 g sample) | Lycopene (ppm) | Volume (m³) |
| 35S | 5.2 ± 0.339 (2) | 66.19 ± 28.617 (2) | 0.1 ± 0.037 (3) |
| AP1 | 4.62 ± NA (1) | 29.5 ± NA (1) | 0.37 ± 0.097 (3) |
| AS1 | 4.91 ± NA (1) | 37.91 ± NA (1) | 0.34 ± NA (1) |

### G1897 (SEQ ID NO: 119 and 120)

[0552] Published background information. G1897 was identified as a gene in the sequence of the TAC clone K8A10 (Accession Number AB026640), released by the Kazusa DNA Research Institute (Chiba, Japan). No further published information about the function of G1897 is available.

[0553] Discoveries in Arabidopsis. The function of G1897 was analyzed using transgenic plants in which G1897 was expressed under the control of the 35S promoter. Overexpression of G1897 produced marked effects on leaf and floral organ development. 35S::G1897 transformants formed narrow, dark-green rossette and cauline leaves. Additionally, most lines were rather small and slow developing compared to wild type. Following the switch to flowering, inflorescences often displayed short internodes and carried flowers with various abnormalities. Interestingly, perianth organs showed equivalent effects to those observed in leaves, and were typically rather long and narrow. By contrast, stamens were rather short; silique formation was very poor, presumably as a result of this defect. 35S::G1897 plants also appeared to have delayed abscission of floral organs, and delayed senescence compared to wild type. Such features were likely a consequence of the overall low fertility and poor seed.

[0554] In addition, overexpression of G1897 in Arabidopsis resulted in an increase in seed glucosinolates M39491 and M39493 in T2 lines 2 and 3. Otherwise, overexpression of G1897 in Arabidopsis did not result in any altered phenotypes in any of the physiological or biochemical assays.

[0555] G1897 expression was detected in flowers, embryos, and siliques, and to a lesser degree in seedlings. The expression of G1897 appears to be reduced in response to Erysiphe infection.

[0556] Discoveries in tomato. Under the cruciferin promoter, plant size ranked in the 95th percentile in plant size. These plants also had good fruit-set.

[0557] Other related data. A paralog of G1897, G798, was not tested in tomato in the present field trial. Overexpression of g1897 under various promoters in tomato caused the production of small plants or small fruit. For example, AP1::G1897 tomato plants were small, while AS1::G1897 tomato plants had small green fruit.

TABLE 72
Data Summary for G1897

| | Promoter summary: Avg. ± StD. (Count) | | |
|---|---|---|---|
| | Brix (g sugar/ | | |
| Promoter | 100 g sample) | Lycopene (ppm) | Volume (m³) |
| 35S | 5.3 ± 0.188 (3) | 50.93 ± 3.285 (3) | 0.31 ± 0.085 (3) |
| AP1 | 5.29 ± 0.615 (2) | 42.75 ± 0.969 (2) | 0.23 ± 0.029 (3) |
| AS1 | 5.91 ± NA (1) | 59.8 ± NA (1) | 0.22 ± 0.046 (3) |
| Cruciferin | 4.93 ± 0.269 (2) | 74.18 ± 1.81 (2) | 0.32 ± 0.024 (3) |
| LTP1 | 4.88 ± 1.124 (2) | 68.86 ± 25.053 (2) | 0.21 ± 0.07 (3) |
| PG | 5.67 ± 0.269 (2) | 41.89 ± 8.648 (2) | 0.14 ± 0.079 (3) |
| RBCS3 | 5.66 ± 0.14 (3) | 59.43 ± 17.173 (3) | 0.3 ± 0.027 (3) |

### G1903 (SEQ ID NO: 121 and 122)

[0558] Published background information. G1903 was identified from the Arabidopsis genomic sequence, GenBank accession number AC021046, based on its sequence similarity within the conserved domain to other DOF related proteins in Arabidopsis. To date, there is no published information regarding the function of this gene.

[0559] Discoveries in Arabidopsis. The function of this gene was analyzed using transgenic plants in which G1903 was expressed under the control of the 35S promoter. Two lines (5 and 7) showed a significant decrease in seed protein content and an increase in seed oil content (though the increase was slightly below our significance cutoffs) as assayed by NIR, otherwise the phenotype of these transgenic plants was wild-type in all other assays performed.

[0560] Gene expression profiling using RT/PCR shows that G1903 is expressed predominantly in flowers, however it is almost undetected in roots and seedlings. Furthermore, there is no significant effect on expression levels of G1903 after exposure to environmental stress conditions. However, microarray analysis indicates that G1903 is induced by cold stress.

[0561] Discoveries in tomato. The fruit lycopene levels for LTP1::G1903 plants were above the highest wild type levels and ranked in the 95th percentile among all measurements. Under the cruciferin and LTP1 promoters, plant size is also significantly greater than the wild-type controls, and cruciferin::G1903 plants also had a heavy fruit-set.

[0562] A G1903 paralog, G1895, was also tested in the field trial. Under the cruciferin promoter, the size of G1895 overexpressors was significantly greater than wild type controls.

[0563] Other related data. Its paralog G1895 was also tested in the field trial. Under the cruciferin promoter, plant size was significantly more than wild type controls.

TABLE 73
Data Summary for G1903

| | Promoter summary: Avg. ± StD. (Count) | | |
|---|---|---|---|
| | Brix (g sugar/ | | |
| Promoter | 100 g sample) | Lycopene (ppm) | Volume (m³) |
| | 5.53 ± 0.5 (3) | 58.95 ± 6.98 (3) | 0.29 ± 0.076 (3) |
| AP1 | NA | NA | 0.23 ± 0.057 (3) |
| Cruciferin | 5.02 ± 0.61 (3) | 68.79 ± 10.74 (3) | 0.33 ± 0.125 (3) |
| LTP1 | 6.12 ± NA (1) | 98.26 ± NA (1) | 0.4 ± 0.033 (3) |
| PG | NA | NA | 0.25 ± 0.06 (3) |
| STM | 5.34 ± 0.247 (2) | 45.66 ± 1.259 (2) | 0.3 ± 0.127 (3) |

### G1909 (SEQ ID NO: 123 and 124)

[0564] Published background information. G1909 is equivalent to the Arabidopsis OBP2 gene (Accession Number AF155816) (Kang H G, Singh K B, 2000). OBP2 was shown by Northern blots to be highly expressed in leaves and roots, and at lower levels in stems and flowers. In roots, OBP2 was induced by auxin and salicylic acid. No further published information about the function of G1909 is available.

[0565] Discoveries in Arabidopsis. The function of G1909 was analyzed using transgenic plants in which G1909 was expressed under the control of the 35S promoter. 35S::G1909 plants appeared identical to controls morphologically and physiologically. In one line (#2), overexpression of G1909 resulted in a marginal decreased in seed protein content as measured by NIR.

[0566] G1909 is expressed in all tissues of Arabidopsis, and its expression in rosette leaves appears to be relatively unchanged in response to the environmental stress-related conditions tested using RT-PCR. Microarray analysis indicated that G1909 is induced by drought, cold, mannitol, ABA, and MeJA.

[0567] Discoveries in tomato. In transgenic tomatoes overexpressing G1909 under the regulatory control of the cruciferin promoter, plant size ranked in the 95th percentile among all plant size measurements.

[0568] Other related data. Overexpression of G1909 under various promoters in tomato caused the production of small plants or small fruit. For example, AP1::G1909 tomato plants were small, while AS1::G1909 tomato plants had small green fruit. Cruciferin::G1909 plants also had compact, small fruit. G1264, a paralog of G1909 was not in the field trial.

TABLE 74
Data Summary for G1909

| | Promoter summary: Avg. ± StD. (Count) | | |
|---|---|---|---|
| | Brix (g sugar/ | | |
| Promoter | 100 g sample) | Lycopene (ppm) | Volume (m³) |
| AP1 | 5.44 ± NA (1) | 50.69 ± NA (1) | 0.21 ± 0.025 (3) |
| AS1 | NA | NA | 0.22 ± 0.05 (2) |
| Cruciferin | 6.05 ± 0.445 (2) | 84.4 ± 5.841 (2) | 0.33 ± 0.049 (2) |
| PG | 5.26 ± NA (1) | 37.57 ± NA (1) | 0.28 ± 0.146 (3) |

### G1935 (SEQ ID NO: 125 and 126)

[0569] Published background information. G1935 corresponds to AT1G77950. G1935 has two potential paralogs in the Arabidopsis genome, G2058 (AT1G77980, AGL66) and G2578 (AT1G22130).

[0570] Discoveries in Arabidopsis. G1935 was analyzed during our Arabidopsis genomics program via 35S::G1935 lines. Overexpression of G1935 in Arabidopsis produced no consistent differences in phenotype compared to wild type. However, it was noted that some of the 35S::G1935 lines were reduced in size and showed accelerated flowering. 35S::G2058 Arabidopsis lines were also analyzed by overexpression during our genomics program and exhibited a wild-type phenotype. Analysis of G2578 was not completed at that time.

[0571] RT-PCR experiments indicated that G1935 was expressed at high levels in siliques. G2058 expression was not detectable in a range of tissues examined by RT-PCR and it was concluded that the gene is expressed either at very low levels or in a highly cell-specific or condition-specific pattern.

[0572] Neither G1935 nor G2058 nor G2578 has been found significantly differentially expressed in response to conditions examined in the microarray studies performed to date.

[0573] Discoveries in tomato. Brix levels from LTP1::G1935 fruits were markedly higher than those found in wild-type control fruit.

[0574] Other related data. The closely related paralogs G2058 and G2578 have not yet been analyzed in the tomato field trial.

TABLE 75
Data Summary for G1935

| | Promoter summary: Avg. ± StD. (Count) | | |
|---|---|---|---|
| | Brix (g sugar/ | | |
| Promoter | 100 g sample) | Lycopene (ppm) | Volume (m³) |
| AP1 | 5.5 ± 0.238 (3) | 82 ± 22.814 (3) | 0.26 ± 0.051 (3) |
| LTP1 | 6.49 ± 0.204 (3) | 53 ± 25.048 (3) | 0.21 ± 0.023 (3) |
| PD | 5.34 ± 0.127 (2) | 81.25 ± 31.346 (2) | 0.24 ± 0.103 (3) |
| RBCS3 | 5.87 ± NA (1) | 77.13 ± NA (1) | 0.18 ± 0.041 (3) |
| STM | 5.98 ± 0.148 (2) | 83.34 ± 14.651 (2) | 0.29 ± 0.107 (3) |

### G1950 (SEQ ID NO: 127 and 128)

[0575] Published background information. The sequence of G1950 (At2g03430) was initially obtained from the Arabidopsis sequencing project, GenBank accession number AC006284.4 (GI:20197736). G1950 has no distinctive features other than the presence of a 33-amino acid repeated ankyrin element known for protein-protein interaction, in the C-terminus of the predicted protein. Amino acid sequence comparison shows similarity to Arabidopsis NPR1.

[0576] Discoveries in Arabidopsis. The analysis of the endogenous level of G1950 transcripts by RT-PCR revealed specific expression in embryos, siliques and germinating seeds. G1950 expression is induced upon auxin treatment, which suggests that G1950 may play an important role in seed/embryo development or other processes specific to seeds (stress-related or desiccation-related). Microarray analysis revealed no significant (p-value<0.01) alteration in G1950 expression in all conditions examined. The function of G1950 was analyzed by ectopic overexpression in Arabidopsis. Plants overexpressing G1950 were more tolerant to infection with the necrotrophic fungal pathogen Botrytis cinerea when compared to wild type control. This phenotype was confirmed using mixed and individual transgenic Arabidopsis lines. G1950 transgenic Arabidopsis plants were morphologically indistinguishable from wild-type plants, and showed no biochemical changes in comparison to wild type control.

[0577] Discoveries in tomato. Transgenic plants expressing G1950 under the AP1, LTP1, PD and PG promoters have significantly (76-130%) increased plant size compared with wild type controls, ranking in the 95th percentile among all volumetric measurements. Similarly, 35S::G1950 transgenic tomatoes ranked in the 90th percentile for plant volume. This is particularly notable for the AP1 and PD promoters, as enhanced volume was not at the expense of fruit yield, since fruit set with these promoters was above average. 35S::G1950 Arabidopsis were morphologically indistinguishable from wild-type plants and more tolerant to Botrytis cinerea, suggesting increased fitness of G1950 transgenic tomatoes in field-grown conditions. This phenotype may be related to better tolerance to stress and/or pathogens.

[0578] Other related data. We have not yet identified a paralog of G1950 in Arabidopsis. Structural similarities with the Arabidopsis NPR1 suggest that G1950 may have a function related to NPR I in regulating transcriptional activity in response to pathogen ingress.

TABLE 76
Data Summary for G1950

| | Promoter summary: Avg. ± StD. (Count) | | |
|---|---|---|---|
| | Brix (g sugar/ | | |
| Promoter | 100 g sample) | Lycopene (ppm) | Volume (m³) |
| 35S | 5.76 ± 1.054 (2) | 75.5 ± 24.805 (2) | 0.29 ± 0.159 (3) |
| AP1 | 5.42 ± 0.435 (3) | 86.72 ± 9.687 (3) | 0.42 ± 0.085 (3) |
| Cruciferin | NA | NA | 0.21 ± NA (1) |
| LTP1 | 5.51 ± 0.548 (3) | 89.77 ± 25.386 (3) | 0.32 ± 0.127 (3) |
| PD | 5.26 ± 0.535 (3) | 89.65 ± 13.85 (3) | 0.36 ± 0.145 (2) |
| PG | 5.67 ± 0.658 (2) | 84.35 ± 33.531 (2) | 0.32 ± 0.043 (3) |
| RBCS3 | 5.55 ± 0.29 (2) | 72.16 ± 19.141 (2) | 0.21 ± 0.109 (3) |
| STM | 5.68 ± 0.976 (2) | 89.81 ± 28.899 (2) | 0.27 ± 0.074 (3) |

### G1954 (SEQ ID NO: 129 and 130)

[0579] Published background information. The sequence of G1954 was obtained from GenBank accession number AB028621, based on its sequence similarity within the conserved domain to other bHLH related proteins in Arabidopsis. G1954 corresponds to AtbHLH097, as described by Heim et al. (2003) and Toledo-Ortiz et al. (2003), which describe the Arabidopsis bHLH gene family.

[0580] Discoveries in Arabidopsis. Overexpression of G1954 under control of the 35S promoter was lethal in Arabidopsis. The transformation frequency obtained with the 35S::G1954 transgene was very low, suggesting that the gene might be lethal at high levels of activity. Zero transformants were isolated from the first two batches of T0 seed sown to kanamycin selection plates (normally we obtain 15-120 T1 plants from each batch). A single tiny transformant was eventually obtained from a third batch of T0 seed, but this plant died at an early stage without setting seeds. A final batch of T0 seed was then selected; no transformants were visible at seven days after sowing, but the plates were incubated for a further seven days. At that point, four very small, late germinating, putative transformants were apparent; these plants displayed very rudimentary development and were too tiny for transplantation to soil. To verify that such plants overexpressed the transgene they were pooled together for RNA extraction; RT-PCR experiments confirmed that G1954 was overexpressed at high levels.

[0581] In a series of microarray experiments with hormone and stress treatments, G1954 expression was not found to be regulated.

[0582] Discoveries in tomato. Brix content in fruit was greater than that in wild type controls in plants expressing G1954 under the AP1 promoter, with a rank in the 95th percentile among all measurements. However, there were no ripe fruit when samples were collected, due to a late-fruiting phenotype in the AP1-regulated lines.

TABLE 77
Data Summary for G1954

| | Promoter summary: Avg. ± StD. (Count) | | |
|---|---|---|---|
| | Brix (g sugar/ | | |
| Promoter | 100 g sample) | Lycopene (ppm) | Volume (m³) |
| 35S | NA | NA | 0.14 ± 0.058 (2) |
| AP1 | 6.47 ± 0.262 (2) | 69.7 ± 6.35 (2) | 0.25 ± 0.027 (3) |
| Cruciferin | 5.52 ± NA (1) | 72.41 ± NA (1) | 0.27 ± NA (1) |
| RBCS3 | 5.81 ± NA (1) | 44.61 ± NA (1) | 0.21 ± NA (1) |
| STM | 4.63 ± NA (1) | 72.13 ± NA (1) | 0.2 ± 0.023 (2) |

### G1958 (SEQ ID NO: 131 and 132)

[0583] Published background information. G1958 was initially identified in the sequence of BAC T5F17, GenBank accession number AL049917, released by the Arabidopsis Genome Initiative. Subsequently, G1958 was published as PHR1. Mutants in PHR1 show reduced growth under conditions of phosphate starvation and fail to induce genes normally regulated by low phosphate concentration (Rubio et al. (2001)).

[0584] Discoveries in Arabidopsis. During our genomics program, we studied both lines homozygous for a T-DNA insertion in G1958 and lines expressing G1958 under the control of the 35S promoter. The knockout plants showed a reduction in root growth on plates, but otherwise appeared wild type. The reduced root growth was accentuated when seedlings were transferred to stress conditions, indicating that it may be environmentally influenced. No consistent differences were observed between 35S::G1958 lines and wild-type controls in any of the assays. Despite the published data indicating a function for G1958 in adaptation to phosphate starvation, overexpression of G1958 did not improve growth on low phosphate in our plate assay. G1958 was not induced in any of our microarray analyses to date, but low nutrient conditions have not been examined.

[0585] Discoveries in tomato. Plants expressing G1958 under three different promoters (35S, AS1 and cruciferin) produced significantly increased plant size at two months. It is possible that this increase is related to the published function of G1958 in regulation of a phosphate starvation response. If plants in the field are somewhat limited for phosphate, up-regulation of phosphorus intake or recycling may increase size. The result that plant volume increased when G1958 was driven under the cruciferin promoter (a seed promoter) may seem surprising; however, this promoter does show some expression in seedlings. Conversely, plants expressing G1958 under the STM promoter were noted to be “compact”. Meristematic expression of this gene may be deleterious.

TABLE 78
Data Summary for G1958

| | Promoter summary: Avg. ± StD. (Count) | | |
|---|---|---|---|
| | Brix (g sugar/ | | |
| Promoter | 100 g sample) | Lycopene (ppm) | Volume (m³) |
| 35S | 5.73 ± NA (1) | 80.07 ± NA (1) | 0.33 ± 0.156 (3) |
| AS1 | 5.97 ± 0.582 (3) | 75.96 ± 5.821 (3) | 0.4 ± 0.029 (3) |
| Cruciferin | 6.05 ± 0.13 (3) | 85 ± 17.886 (3) | 0.41 ± 0.087 (3) |
| PG | NA | NA | 0.17 ± 0.071 (3) |
| STM | 5.8 ± 0.424 (2) | 61.45 ± 8.754 (2) | 0.28 ± 0.191 (3) |

### G2052 (SEQ ID NO: 133 and 134)

[0586] Published background information. G2052 was identified in the sequence of BAC T13D8 with accession number AC004473 released by the Arabidopsis Genome Initiative. It also corresponds to the AGI locus of AT5G46590. A comprehensive analysis of NAC family transcription factors was recently published by Ooka et al. (2003) where G2052 was identified as ANAC096.

[0587] Discoveries in Arabidopsis. The function of G2052 was analyzed using transgenic plants in which the gene was expressed under the control of the 35S promoter. The phenotype of the 35S::G2052 transgenics was wild type in morphology, and wild type with respect to their response to biochemical and physiological analyses. RT-PCR analysis of the endogenous levels of G2052 indicates that this gene is expressed at moderate levels in most tissues. Microarrays of eight-week-old Arabidopsis (ecotype col) plants exposed to drought stress and allowed to recover were performed. Plants in the drought recovery stage were found to produce G2052 transcript above four fold that of untreated plants.

[0588] Discoveries in tomato. Transgenic tomatoes expressing G2052 under the regulation of 35S, AP1, AS1, Cruciferin, LTP1, PD and PG promoters were analyzed for alterations in plant size, soluble solids and lycopene. Under the regulation of three out seven promoters (AP1, LTP1, PD) significant increases in plant size were observed. It is particularly notable that in lines overexpressing G2052 with the AP1 promoter, increased plant size was also associated with increased fruit set.

[0589] Other related data. G2052 has one paralog in Arabidopsis, G506, which was also included in the present field trial. G506 transgenic lines did not score in the 95th percentile for any trait.

TABLE 79
Data Summary for G2052

| | Promoter summary: Avg. ± StD. (Count) | | |
|---|---|---|---|
| | Brix (g sugar/ | | |
| Promoter | 100 g sample) | Lycopene (ppm) | Volume (m³) |
| 35S | 5.44 ± 0.151 (3) | 70.12 ± 18.895 (3) | 0.25 ± 0.06 (3) |
| AP1 | 5.43 ± 0.372 (3) | 66.48 ± 18.905 (3) | 0.36 ± 0.038 (3) |
| AS1 | 5.27 ± 0.569 (3) | 69.74 ± 25.614 (3) | 0.25 ± 0.035 (3) |
| Cruciferin | 5.6 ± 0.336 (3) | 52.97 ± 10.726 (3) | 0.32 ± 0.021 (3) |
| LTP1 | 6.03 ± NA (1) | 76.26 ± NA (1) | 0.34 ± NA (1) |
| PD | 4.3 ± 0.643 (2) | 67.69 ± 6.06 (2) | 0.34 ± 0.109 (3) |
| PG | 5.48 ± 0.834 (3) | 81.23 ± 13.142 (3) | 0.3 ± 0.127 (3) |

### G2072 (SEQ ID NO: 135 and 136)

[0590] Published background information. G2072 was discovered as a gene in BAC F1504, accession number AC007887, released by the Arabidopsis genome initiative. There is no published information regarding the function of G2072.

[0591] Discoveries in Arabidopsis. The boundaries of G2072 were determined and the function of this gene was analyzed using transgenic plants in which G2072 was expressed under the control of the 35 S promoter. The phenotype of these transgenic plants was wild type in all assays performed. G2072 expression appeared to be flower specific and not induced by any of the environmental conditions tested.

[0592] Discoveries in tomato. The fruit lycopene level under the AS1 promoter was higher than the highest wild type level and ranked above the 95th percentile among all lycopene measurements, and was higher than the highest wild type level. Arabidopsis lines overexpressing G2072 produced wild-type phenotypes in all assays performed.

TABLE 80
Data Summary for G2072

| | Promoter summary: Avg. ± StD. (Count) | | |
|---|---|---|---|
| | Brix (g sugar/ | | |
| Promoter | 100 g sample) | Lycopene (ppm) | Volume (m³) |
| 35S | 4.85 ± 0.629 (2) | 76.78 ± 12.82 (2) | 0.13 ± 0.072 (3) |
| AP1 | 5.26 ± NA (1) | 73.92 ± NA (1) | 0.14 ± 0.008 (3) |
| AS1 | 5.66 ± NA (1) | 104.79 ± NA (1) | 0.17 ± 0.038 (3) |
| LTP1 | 5.71 ± NA (1) | 40.6 ± NA (1) | 0.08 ± 0.012 (3) |
| PG | NA | NA | 0.18 ± NA (1) |

### G2108 (SEQ ID NO: 137 and 138)

[0593] Published background information. G2108 was identified in the sequence of BAC clone F13K23 (AC012187, gene F13K23.14). Sakuma et al. (2002) categorized G2108 into the B1 subgroup of the AP2 transcription factor family, with the B family having only a single ERF domain.

[0594] Discoveries in Arabidopsis. Overexpression of G2108 under control of the 35S promoter produced plants with alterations in plant growth and development. 35S::G2108 plants had a more compact inflorescence structure than wild type; internodes were short and an increased number of cauline leaf nodes were apparent on both the primary and higher order shoots. Apical dominance was also reduced, and a number of shoots borne from the axils of rosette leaves attained the same length as the primary inflorescence. The plants with altered shoot morphology also produced siliques that were rather wide and flat compared to those of wild type. In addition to the alterations in inflorescence structure, many of the individuals in the replant populations were noted to have rather curled leaves. Global transcript profiling under a variety of stress conditions revealed no conditions in which G2108 expression was modified compared to standard growth conditions. Qualitative RT-PCR indicated that G2108 is induced following auxin treatment.

[0595] Discoveries in tomato. Lycopene content and Brix content in fruit were greater than that in wild type controls in plants expressing G2108 under the PG promoter, with a rank in the 95th percentile among all measurements. Arabidopsis plants overexpressing G2108 under the 35S promoter had more compact inflorescences, twisted and curled leaves, and flattened siliques. The curling of leaves was reminiscent of epinasty, which can be induced by auxin treatment. Fruit development is also promoted by auxin treatment, suggesting the hypothesis that the effect of G2108 ectopic expression in fruit under the PG promoter may have its effects through modulation of certain auxin responses.

TABLE 81
Data Summary for G2108

| | Promoter summary: Avg. ± StD. (Count) | | |
|---|---|---|---|
| | Brix (g sugar/ | | |
| Promoter | 100 g sample) | Lycopene (ppm) | Volume (m³) |
| 35S | 5.09 ± NA (1) | 69.22 ± NA (1) | 0.16 ± 0.093 (3) |
| AS1 | 5.58 ± 0.665 (2) | 58.41 ± 0.127 (2) | 0.18 ± 0.034 (3) |
| Cruciferin | 6.06 ± NA (1) | 87.55 ± NA (1) | 0.17 ± 0.024 (3) |
| LTP1 | 5.77 ± 0.085 (3) | 40.41 ± 3.103 (3) | 0.18 ± 0.072 (3) |
| PD | 4.55 ± 1.485 (2) | 32.83 ± 18.675 (2) | 0.21 ± 0.027 (3) |
| PG | 6.58 ± NA (1) | 105.17 ± NA (1) | 0.13 ± 0.008 (3) |

### G2116 (SEQ ID NO: 139 and 140)

[0596] Published background information. G2116 was identified in the sequence of BAC F4H5, GenBank accession number AC011001, released by the Arabidopsis Genome Initiative. There is no published information regarding the function of G2116.

[0597] Discoveries in Arabidopsis. The annotation of G2116 in BAC AC011001 was experimentally determined. The function of this gene was analyzed using transgenic plants in which G2116 was expressed under the control of the 35S promoter. The phenotype of these transgenic plants was wild type in all assays performed. G2116 appeared to be constitutively expressed in all tissues and environmental conditions tested.

[0598] Discoveries in tomato. In transgenic tomatoes overexpressing G2116 under the regulatory control of the PG promoter, the fruit lycopene level was higher than the highest wild type level and ranked above the 95th percentile among all lycopene measurements.

TABLE 82
Data Summary for G2116

| | Promoter summary: Avg. ± StD. (Count) | | |
|---|---|---|---|
| | Brix (g sugar/ | | |
| Promoter | 100 g sample) | Lycopene (ppm) | Volume (m³) |
| 35S | 6.18 ± NA (1) | 94 ± NA (1) | 0.09 ± 0.014 (2) |
| AP1 | 4.91 ± NA (1) | 56.06 ± NA (1) | 0.1 ± 0.015 (2) |
| AS1 | 5.49 ± NA (1) | 45.85 ± NA (1) | 0.1 ± 0.035 (3) |
| Cruciferin | 5.4 ± 0.188 (3) | 73.02 ± 31.149 (3) | 0.14 ± 0.023 (3) |
| PG | 5.37 ± 0.735 (2) | 103.61 ± 35.44 (2) | 0.13 ± 0.032 (3) |

### G2132 (SEQ ID NO: 141 and 142)

[0599] Published background information. G2132 was identified in the sequence of BAC clone F27J15 (AC016041, gene F27J15.11). Sakuma et al. (2002) categorized G2132 into the B6 subgroup of the AP2 transcription factor family, with the B family having only a single ERF domain.

[0600] Discoveries in Arabidopsis. Overexpressors of G2132 under control of the 35S promoter were slightly small, slower developing, sometimes had pale patches on leaves, and showed reductions in seed yield.

[0601] None of the stress challenge array background experiments revealed any regulation of G2132 expression.

[0602] Discoveries in tomato. Brix content in fruit was greater than that in wild type controls in plants expressing G2132 under the PG promoter, with a rank in the 95th percentile among all measurements. However, there were no ripe fruit when samples were collected, due to a late-fruiting phenotype in the PG-regulated lines.

TABLE 83
Data Summary for G2132

| | Promoter summary: Avg. ± StD. (Count) | | |
|---|---|---|---|
| | Brix (g sugar/ | | |
| Promoter | 100 g sample) | Lycopene (ppm) | Volume (m³) |
| AP1 | 5.94 ± 0.87 (2) | 75.38 ± 16.278 (2) | 0.27 ± 0.051 (3) |
| AS1 | NA | NA | 0.15 ± 0.041 (3) |
| Cruciferin | NA | NA | 0.2 ± 0.02 (3) |
| PD | NA | NA | 0.19 ± 0.093 (3) |
| PG | 6.43 ± NA (1) | 92.6 ± NA (1) | 0.21 ± 0.037 (2) |

### G2137 (SEQ ID NO: 143 and 144)

[0603] Published background information. G2137 corresponds to AtWRKY9 (At1g68150), for which there is no published literature beyond the general description of WRKY family members (Eulgem et al. (2000)).

[0604] Discoveries in Arabidopsis. The function of G2137 was studied using transgenic plants in which the gene was expressed under the control of the 35S promoter. 35S::G2137 plants were wild type in morphology and development, as well as in the physiological and biochemical analyses that were performed.

[0605] G2137 expression is detected at higher levels in root tissue, and can also be detected in leaf, embryo, and seedling tissue samples. G2137 expression is not ectopically induced by any of the conditions tested, except perhaps by auxin treatment.

[0606] In an Arabidopsis microarray experiment, G2137 was found to be five-fold induced (p<0.01) after treatment (0.5 hr) with salicylic acid.

[0607] Discoveries in tomato. Transgenic tomatoes expressing G2137 under the AP1, Cruciferin, LTP1, PG, RBCS3 or STM promoters were analyzed for alteration in plant size, soluble solids and lycopene. The Brix levels of STM::G2137 overexpressing tomato plants ranked in the 95th percentile among all other measurements. STM::G2137 overexpressors were noted to be smaller than wild type, and to produce small fruit, consistent with reported observations that fruit size and Brix are frequently inversely related.

TABLE 84
Data Summary for G2137

| | Promoter summary: Avg. ± StD. (Count) | | |
|---|---|---|---|
| | Brix (g sugar/ | | |
| Promoter | 100 g sample) | Lycopene (ppm) | Volume (m³) |
| AP1 | 5.47 ± 0.311 (3) | 44.7 ± 5.315 (3) | 0.18 ± 0.031 (3) |
| Cruciferin | 5.46 ± 0.141 (2) | 42.2 ± 16.589 (2) | 0.2 ± 0.055 (3) |
| LTP1 | 5.09 ± 0.919 (2) | 46.84 ± 0.311 (2) | 0.11 ± 0.063 (3) |
| PG | 4.67 ± NA (1) | 36.06 ± NA (1) | 0.16 ± 0.054 (3) |
| RBCS3 | 5.36 ± 0.12 (3) | 56.45 ± 16.584 (3) | 0.18 ± 0.016 (3) |
| STM | 6.32 ± NA (1) | 84.07 ± NA (1) | 0.14 ± 0.107 (3) |

### G2141 (SEQ ID NO: 145 and 146)

[0608] Published background information. The sequence of G2141 was obtained from GenBank accession number AC011665, corresponding to gene T6L1.10, based on its sequence similarity within the conserved domain to other bHLH related proteins in Arabidopsis. G2141 corresponds to AtbHLH049, as described by Heim et al. (2003) and Toledo-Ortiz et al. (2003), which describe the Arabidopsis bHLH gene family.

[0609] Discoveries in Arabidopsis. Overexpression of G2141 under control of the 35S promoter in Arabidopsis resulted in plants with elongated cotyledons. Later in development, the majority of these plants appeared wild type, but a number of lines were smaller than controls. Additionally, 3/18 T1 plants (#1, 3 and 12) displayed somewhat flat broad leaves.

[0610] In a series of microarray experiments with hormone and stress treatments, G2141 expression was not found to be regulated.

[0611] Discoveries in tomato. Brix and lycopene content in fruit was greater than that in wild type controls in plants expressing G2141 under the PG promoter, with a rank in the 95th percentile among all measurements.

TABLE 85
Data Summary for G2141

| | Promoter summary: Avg. ± StD. (Count) | | |
|---|---|---|---|
| | Brix (g sugar/ | | |
| Promoter | 100 g sample) | Lycopene (ppm) | Volume (m³) |
| 35S | NA | NA | 0.14 ± 0.033 (3) |
| AP1 | 6 ± 0.696 (3) | 58.44 ± 13.932 (3) | 0.13 ± 0.006 (3) |
| LTP1 | 5.88 ± NA (1) | 64.97 ± NA (1) | 0.18 ± 0.04 (3) |
| PG | 6.88 ± NA (1) | 98.78 ± NA (1) | 0.09 ± 0.016 (3) |
| STM | NA | NA | 0.15 ± NA (1) |

### G2145 (SEQ ID NO: 147 and 148)

[0612] Published background information. The sequence of G2145 was obtained from GenBank accession number AC012375, based on its sequence similarity within the conserved domain to other bHLH related proteins in Arabidopsis. G2145 corresponds to AtbHLH054, as described by Heim et al. (2003) and Toledo-Ortiz et al. (2003), which describe the Arabidopsis bHLH gene family.

[0613] Discoveries in Arabidopsis. Overexpression of G2145 under control of the 35S promoter in Arabidopsis resulted in plants that were distinctly smaller than wild-type at all developmental stages, produced rather curled dark green leaves, and generated thin inflorescences that yielded relatively few seeds.

[0614] In a series of microarray experiments with hormone and stress treatments, G2145 expression was found to be up-regulated by cold treatment in roots. Expression of G2145 was also up-regulated in 35S::G682 transgenic in roots. Qualitative RT-PCR experiments indicated that G2145 was expressed root-preferentially.

[0615] Discoveries in tomato. Lycopene content in fruit was greater than that in wild type controls in plants expressing G2145 under the PG promoter, with a rank in the 95th percentile among all measurements. In seedlings expressing G2145 under the 35S promoter, leaves had paler green color than in wild type controls. Overexpression of G2145 with the 35S promoter in Arabidopsis produced small plants with contorted, dark green leaves and poor fertility.

[0616] Other related data. We have identified one paralog of G2145, G2148, which was not included in the present field trial.

TABLE 86
Data Summary for G2145

| | Promoter summary: Avg. ± StD. (Count) | | |
|---|---|---|---|
| | Brix (g sugar/ | | |
| Promoter | 100 g sample) | Lycopene (ppm) | Volume (m³) |
| AP1 | NA | NA | 0.05 ± 0.039 (3) |
| LTP1 | NA | NA | 0.11 ± 0.015 (3) |
| RBCS3 | 5.83 ± NA (1) | 103.06 ± NA (1) | 0.12 ± 0.032 (3) |
| STM | 4.55 ± NA (1) | 70.84 ± NA (1) | 0.03 ± 0.014 (3) |

### G2150 (SEQ ID NO: 149 and 150)

[0617] Published background information. The sequence of G2150 was obtained from GenBank accession number AP000377, corresponding to gene MYM9.3 (13AB01846), based on its sequence similarity within the conserved domain to other bHLH related proteins in Arabidopsis. G2150 corresponds to AtbHLH077, as described by Heim et al. (2003) and Toledo-Ortiz et al. (2003), which describe the Arabidopsis bHLH gene family.

[0618] Discoveries in Arabidopsis. Overexpression of G2150 under control of the 35S promoter in Arabidopsis resulted in plants with normal appearance and physiology.

[0619] In a series of microarray experiments with hormone and stress treatments, G2150 expression was not found to be regulated.

[0620] Discoveries in tomato. Brix content in fruit was greater than that in wild type controls in plants expressing G2150 under the LTP1 promoter, with a rank in the 95th percentile among all measurements. In seedlings expressing G2150 under the 35S promoter, leaves were chlorotic and stems were elongate (etiolated appearance). Overexpression of G2150 with the 35S promoter in Arabidopsis produced plants with normal appearance and physiology.

TABLE 87
Data Summary for G2150

| | Promoter summary: Avg. ± StD. (Count) | | |
|---|---|---|---|
| | Brix (g sugar/ | | |
| Promoter | 100 g sample) | Lycopene (ppm) | Volume (m³) |
| 35S | 5.45 ± NA (1) | 91.64 ± NA (1) | 0.08 ± 0.061 (3) |
| AP1 | 5.93 ± 0.37 (3) | 85.46 ± 32.407 (3) | 0.19 ± 0.018 (3) |
| AS1 | 6.28 ± 0.134 (2) | 70.95 ± 37.265 (2) | 0.2 ± 0.042 (3) |
| LTP1 | 6.37 ± 0.226 (2) | 81.49 ± 12.544 (2) | 0.1 ± 0.042 (3) |
| RBCS3 | 5.4 ± NA (1) | 70.51 ± NA (1) | 0.12 ± NA (1) |
| STM | 5.85 ± 0.276 (2) | 67.88 ± 18.144 (2) | 0.14 ± 0.046 (3) |

### G2157 (SEQ ID NO: 151 and 152)

[0621] Published background information. The sequence of G2157 was obtained from Arabidopsis genomic sequencing project, GenBank accession number AL132975, based on its sequence similarity within the conserved domain to other AT-hook related proteins in Arabidopsis. G2157 corresponds to gene T22E16.220 (CAB75914).

[0622] Discoveries in Arabidopsis. The complete sequence of G2157 was determined. G2157 is expressed at low to moderate levels throughout the plant. It shows induction by Fusarium infection and possibly by auxin. The function of this gene was analyzed using transgenic plants in which G2157 was expressed under the control of the 35S promoter.

[0623] Overexpression of G2157 produced distinct changes in leaf development and severely reduced overall plant size and fertility. The most strongly affected 35S::G2157 primary transformants were tiny, slow growing, and developed small dark green leaves that were often curled, contorted, or had serrated margins. A number of these plants arrested growth at a vegetative stage and failed to flower. Lines with a more moderate phenotype produced thin inflorescence stems; the flowers borne on these structures were frequently sterile and failed to open or had poorly formed stamens. Due to such defects, the vast majority of T1 plants produced very few seeds. The progeny of three T1 lines showing a moderately severe phenotype were examined; all three T2 populations, however, displayed wild-type morphology, suggesting that activity of the transgene had been reduced between the generations.

[0624] G2157 expression has been assayed using microarrays. Assays in which severe drought conditions were applied to 6-week-old Arabidopsis plants resulted in the increase of G2157 transcript approximately two fold above wild type plants.

[0625] Discoveries in tomato. Under the regulation of AP1, LTP and STM a significant increase in G2157 overexpressor plant size was observed. Results with the AP1 and STM promoters were particularly notable as the increased plant size was also associated with increased fruit set in these lines.

[0626] G2157 is closely related to a subfamily of transcription factors well characterized in their ability to confer drought tolerance and to increase organ size. Genes within this subfamily have also exhibited deleterious morphological effects as in the overexpression of G2157 in Arabidopsis. It has been hypothesized that targeted expression of genes in this subfamily could increase the efficacy or penetrance of desirable phenotypes.

[0627] In our overexpression studies of G1073 (G2157 related), different promoters were used to optimize desired phenotypes. In this analysis, we discovered that localized expression via a promoter specific to young leaf and stem primordia (SUC2) was more effective than a promoter (RbcS3) lacking expression in meristematic tissue. In tomato, a similar result was obtained by expressing G2157 in meristematic and primordial tissues via the STM and AP1 promoters, respectively. G2157 has also been identified as being significantly induced under severe drought conditions. These results provide strong evidence that G2157, when expressed in localized tissues in tomatoes, mechanistically functions in a similar fashion to its closely related putative paralogs in the G1073 clade.

[0628] Other related data. In a phylogenetic analysis of AT-hook proteins, G2157 falls within the G1073 clade of transcription factor polypeptides, a subfamily characterized as being involved in regulation of abiotic stress responses, organ size and overall plant size. This clade contains a sizable number of genes from monocot and dicot species that have been shown to increase organ size when overexpressed.

TABLE 88
Data Summary for G2157

| | Promoter summary: Avg. ± StD. (Count) | | |
|---|---|---|---|
| | Brix (g sugar/ | | |
| Promoter | 100 g sample) | Lycopene (ppm) | Volume (m³) |
| 35S | 4.83 ± 0.272 (3) | 51.17 ± 11.663 (3) | 0.31 ± 0.087 (3) |
| AP1 | 6.14 ± 0.43 (3) | 78.05 ± 12.231 (3) | 0.33 ± 0.068 (3) |
| AS1 | 5.94 ± 0.242 (3) | 80.99 ± 27.876 (3) | 0.18 ± 0.035 (3) |
| Cruciferin | 5.08 ± 0.219 (2) | 69.16 ± 9.737 (2) | 0.29 ± 0.054 (3) |
| LTP1 | 5.5 ± 0.321 (3) | 87.62 ± 15.783 (3) | 0.33 ± 0.054 (3) |
| PD | 5.84 ± 0.255 (2) | 67.94 ± 35.751 (2) | 0.31 ± 0.049 (3) |
| PG | 5.43 ± 0.099 (2) | 70.38 ± 24.947 (2) | 0.23 ± 0.1 (3) |
| RBCS3 | 5.7 ± 0.862 (3) | 75.57 ± 4.603 (3) | 0.23 ± 0.168 (3) |
| STM | 5.5 ± 0.163 (2) | 64.78 ± 17.388 (2) | 0.36 ± 0.114 (2) |

### G2294 (SEQ ID NO: 153 and 154)

[0629] Published background information. G2294 corresponds to gene T12C22.10 (AAF78266). Sakuma et al. (2002) categorized G2294 into the A5 subgroup of the AP2 transcription factor family, with the A family related to the DREB and CBF genes.

[0630] Discoveries in Arabidopsis. Overexpression of G2294 under control of the 35S promoter produced plants that were markedly smaller than wild-type controls. The most severely affected T1 plant died without flowering, whilst the others formed short, thin, inflorescences that carried small, poorly-fertile flowers, and set few seeds. In a series of microarray experiments with hormone and stress treatments, G2294 was found to be up-regulated by ACC treatment in shoots after 4-8 hours, induced in roots by cold treatment from 0.5 up through 8 hours following treatment, and induced in roots 4-8 hours following salt treatment.

[0631] Discoveries in tomato. Lycopene and Brix content in fruit were greater than that in wild type controls in plants expressing G2294 under the LTP1 promoter, with a rank in the 95th percentile among all measurements (but this result was obtained with only a single fruit sample). Brix level and plant size were greater than that in wild type controls in plants expressing G2294 under the 35S promoter, with a rank in the 95th percentile among all measurements. In seedlings expressing G2294 under the 35S promoter, size was normal but leaves were narrow and curled downward. Plant size was also significantly reduced upon overexpression of G2294 with the 35S promoter in Arabidopsis.

[0632] Other related data. We have identified two paralogs of G2294 in Arabidopsis, G2067 and G2115. These genes were not included in the present field trial.

TABLE 89
Data Summary for G2294

| | Promoter summary: Avg. ± StD. (Count) | | |
|---|---|---|---|
| | Brix (g sugar/ | | |
| Promoter | 100 g sample) | Lycopene (ppm) | Volume (m³) |
| 35S | 6.31 ± 0.453 (3) | 71.9 ± 9.018 (3) | 0.32 ± 0.078 (3) |
| AS1 | 5.76 ± 0.969 (2) | 62.41 ± 11.985 (2) | 0.16 ± 0.098 (3) |
| LTP1 | 6.31 ± NA (1) | 127.71 ± NA (1) | 0.22 ± 0.047 (3) |
| RBCS3 | 5.49 ± 0.357 (3) | 73.09 ± 4.85 (3) | 0.29 ± 0.045 (3) |
| STM | 5.88 ± 0.845 (3) | 72.51 ± 7.079 (3) | 0.23 ± 0.053 (3) |

### G2296 (SEQ ID NO: 155 and 156)

[0633] Published background information. G2296 corresponds to AtWRKY66 (At1 g80590), for which there is no published literature beyond the general description of WRKY family members (Eulgem et al. (2000)).

[0634] Discoveries in Arabidopsis. The function of G2296 was studied using transgenic plants in which the gene was expressed under the control of the 35S promoter. 35S::G2296 plants were wild type in morphology and development, as well as in the physiological and biochemical analyses that were performed.

[0635] G2296 expression was detected in a variety of tissues, and the gene was strongly induced by salicylic acid in root tissue (up to 8-fold).

[0636] Discoveries in tomato. Plants expressing Cruciferin::G2296 were noted to be very large, and to be generally delayed in fruit maturation. The Brix level of transgenic tomatoes expressing G2296 under control of the Cruciferin promoter ranked in the 95th percentile among all Brix measurements and was higher than in any wild-type plant measured. A single plant expressing Cruciferin::G2296 produced no fruit, as did plants overexpressing G2296 with the AP1 or AS1 promoters.

TABLE 90
Data Summary for G2296

| | Promoter summary: Avg. ± StD. (Count) | | |
|---|---|---|---|
| | Brix (g sugar/ | | |
| Promoter | 100 g sample) | Lycopene (ppm) | Volume (m³) |
| AP1 | NA | NA | 0.11 ± 0.018 (3) |
| AS1 | 6.24 ± NA (1) | 50.62 ± NA (1) | 0.07 ± 0.008 (3) |
| Cruciferin | 6.73 ± NA (1) | 50.74 ± NA (1) | 0.1 ± 0.078 (3) |
| PG | NA | NA | 0.17 ± 0.072 (3) |
| RBCS3 | 5.95 ± 0.191 (3) | 91.18 ± 35.404 (3) | 0.21 ± 0.044 (3) |
| STM | 6.02 ± NA (1) | 42.39 ± NA (1) | 0.07 ± 0.016 (2) |

### G2313 (SEQ ID NO: 157 and 158)

[0637] Published background information. G2313 (At3g10590) was identified in the sequence of BAC F13M14 (GenBank accession number AC011560), released by the Arabidopsis Genome Initiative.

[0638] Discoveries in Arabidopsis. The function of this gene was analyzed using transgenic Arabidopsis plants in which G2313 was expressed under the control of the 35S promoter. Analysis of primary 35S::G2313 transformants indicates that overexpression of this gene in Arabidopsis has detrimental effects for plant growth and development. However, these lines displayed a wild-type morphology in the next generation, possibly due to silencing of the transgene. T2 generation plants were wild type in all biochemical and physiological assays performed. As determined by RT-PCR, G2313 is highly expressed in flower, embryo, and silique. Very low levels of G-313 expression were also detected in other tissue with the exception of germinating seeds. G2313 was also induced slightly by SA, auxin, ABA, osmotic stress and heat stress treatments, as determined by RT-PCR. G2313 was not found to be significantly induced or repressed in any of our GeneChip microarray experiments.

[0639] Discoveries in tomato. The fruit lycopene level under the AS1 promoter was higher than the highest wild type level and ranked in the 95th percentile among all lycopene measurements. Analysis of primary 35S::G2313 transformants indicated that overexpression of this gene in Arabidopsis had detrimental effects for plant growth and development. However, these lines displayed a wild-type morphology in the next generation, possibly due to silencing of the transgene. T2 generation plants were wild type in all biochemical and physiological assays performed.

TABLE 91
Data Summary for G2313

| | Promoter summary: Avg. ± StD. (Count) | | |
|---|---|---|---|
| | Brix (g sugar/ | | |
| Promoter | 100 g sample) | Lycopene (ppm) | Volume (m³) |
| 35S | 4.87 ± 0.398 (3) | 34.51 ± 9.183 (3) | 0.15 ± 0.053 (3) |
| AP1 | 5.28 ± 0.58 (2) | 45.68 ± 21.793 (2) | 0.19 ± 0.009 (3) |
| AS1 | 5.35 ± 0.509 (2) | 100.96 ± 17.522 (2) | 0.15 ± 0.014 (3) |
| STM | NA | NA | 0.14 ± 0.019 (2) |

### G2417 (SEQ ID NO: 159 and 160)

[0640] Published background information. G2417 was identified in the sequence of chromosome 2, GenBank accession number AC00656, released by the Arabidopsis Genome Initiative. No further published or public information is available about G2417.

[0641] Discoveries in Arabidopsis. The function of G2417 was analyzed using transgenic plants in which this gene was expressed under the control of the 35S promoter. The phenotype of these transgenic plants was wild type in all morphological, physiological, and biochemical assays performed. G2417 is ubiquitously expressed, and it is not induced or repressed by any condition tested by RT-PCR or microarray analysis.

[0642] Discoveries in tomato. Plants expressing G2417 under the LTP1 promoter were in the 95th percentile of fruit lycopene measurements.

TABLE 92
Data Summary for G2417

| | Promoter summary: Avg. ± StD. (Count) | | |
|---|---|---|---|
| | Brix (g sugar/ | | |
| Promoter | 100 g sample) | Lycopene (ppm) | Volume (m³) |
| AP1 | 5.91 ± 0.12 (2) | 61.53 ± 1.322 (2) | 0.27 ± 0.022 (3) |
| AS1 | NA | NA | 0.15 ± 0.066 (3) |
| Cruciferin | 5.35 ± 0.283 (2) | 47 ± 18.604 (2) | 0.24 ± 0.014 (3) |
| LTP1 | 5.74 ± NA (1) | 114.96 ± NA (1) | 0.2 ± 0.056 (3) |
| PD | NA | NA | 0.18 ± 0.034 (3) |
| PG | 5.45 ± NA (1) | 63.04 ± NA (1) | 0.25 ± 0.076 (3) |
| STM | 5.42 ± 0.643 (2) | 53.45 ± 8.294 (2) | 0.17 ± 0.055 (3) |

### G2425 (SEQ ID NO: 161 and 162)

[0643] Published background information. G2425 corresponds to gene At1 g74430 and is also referred to as AtMYB95 (Stracke et al. (2001)).

[0644] Discoveries in Arabidopsis. The function of G2425 was analyzed using transgenic Arabidopsis plants in which the gene was expressed under the control of the 35S promoter. The phenotype of the 35S::G2425 transgenic plants was wild type in morphology and development, as well as in the different physiological and biochemical analyses that were performed.

[0645] RT-PCR analysis of the endogenous levels of G2425 indicates that this gene is expressed ubiquitously and that it may be induced by ABA and auxin treatments. Microarray analysis shows that G2425 is repressed by drought stress, induced by methyl jasmonate, and may be induced by ABA.

[0646] Discoveries in tomato. The size of tomato plants overexpressing G2425 under the AP1 and PD promoters ranked in the 95th percentile among all plant size measurements. In addition, under the LTP1 promoter, the fruit Brix level was very close to the highest wild-type level and ranked in the 95th percentile among all Brix measurements.

TABLE 93
Data Summary for G2425

| | Promoter summary: Avg. ± StD. (Count) | | |
|---|---|---|---|
| | Brix (g sugar/ | | |
| Promoter | 100 g sample) | Lycopene (ppm) | Volume (m³) |
| 35S | 5.53 ± NA (1) | 56.39 ± NA (1) | 0.25 ± 0.042 (3) |
| AP1 | 5.03 ± 0.615 (3) | 68 ± 28.893 (3) | 0.32 ± 0.01 (3) |
| AS1 | 4.62 ± NA (1) | 50.49 ± NA (1) | 0.25 ± 0.059 (3) |
| Cruciferin | 6.1 ± 0.401 (3) | 55.05 ± 2.412 (3) | 0.26 ± 0.027 (3) |
| LTP1 | 6.32 ± NA (1) | 49.06 ± NA (1) | 0.21 ± 0.032 (3) |
| PD | 5.51 ± 0.611 (3) | 46.7 ± 15.531 (3) | 0.33 ± 0.052 (3) |
| PG | NA | NA | 0.15 ± 0.049 (3) |

### G2505 (SEQ ID NO: 163 and 164)

[0647] Published background information. G2505 was identified in the sequence of contig fragment No. 29, GenBank accession number AL161517, released by the Arabidopsis Genome Initiative. It also corresponds to the AGI locus of AT4G10350. A comprehensive analysis of NAC family transcription factors was recently published by Ooka et al. (2003) where G2052 was identified as ANAC070.

[0648] Discoveries in Arabidopsis. Analysis of the function of G2505 was attempted through the generation transgenic plants in which the gene was expressed under the control of the 35S promoter. However, despite numerous repeated attempts, we were only able to obtain a few 35S::G2505 transformants; thus, overexpression of this gene likely caused lethality during embryo or early seedling development. In addition to the deleterious effects of this gene when overexpressed, a few lines that were obtained were distinctly small and dark in coloration. Only two of these lines produced sufficient seed for physiology assays to be performed. Both of those lines displayed enhanced performance in a severe drought assay. In a phylogenetic analysis, G2635 was determined to the most similar to G2505. We have not identified functional data for G2635. Microarray data did not show any significant transcriptional differences to wild type in all experimental conditions assayed.

[0649] Discoveries in tomato. Under the regulation of the RBCS3 promoter, a significant increase in lycopene levels in G2505 overexpressors was observed.

[0650] Other related data. We have identified one paralog of G2505 in Arabidopsis, G2635, which was not included in the present field trial.

TABLE 94
Data Summary for G2505

| | Promoter summary: Avg. ± StD. (Count) | | |
|---|---|---|---|
| | Brix (g sugar/ | | |
| Promoter | 100 g sample) | Lycopene (ppm) | Volume (m³) |
| AP1 | 4.72 ± 0.233 (2) | 81.77 ± 16.44 (2) | 0.23 ± 0.024 (3) |
| AS1 | NA | NA | 0.2 ± 0.035 (3) |
| Cruciferin | 5.69 ± NA (1) | 82.83 ± NA (1) | 0.29 ± NA (1) |
| LTP1 | NA | NA | 0.22 ± 0.01 (3) |
| PD | NA | NA | 0.13 ± 0.038 (3) |
| RBCS3 | 5.29 ± NA (1) | 99.52 ± NA (1) | 0.24 ± 0.03 (3) |
| STM | NA | NA | 0.23 ± 0.039 (3) |

### Example VII

### Summary of Results

[0651] Using the methods described in the above Examples, we identified a number of Arabidopsis sequences that resulted in higher fruit Brix, higher fruit lycopene, and enhanced plant size, respectively, when expressed in tomato. A summary of the sequences that resulted in higher fruit Brix, higher fruit lycopene, and enhanced plant size is presented in Tables 95, 96 and 97. In the tables, a G0D may be repeated if two or more replicates fell within the 95th percentile.

TABLE 95
Experimental values for soluble solids (Brix) in or above 95% percentile

| | | Measured Brix |
|---|---|---|
| GID | Promoter | (g sugar/100 g sample) |
| G22 | AP1 | 7.29 |
| G2141 | PG | 6.88 |
| G635 | PD | 6.85 |
| G522 | 35S | 6.8 |
| G2296 | Cruciferin | 6.73 |
| G580 | STM | 6.7 |
| G1007 | Cruciferin | 6.67 |
| G1755 | AP1 | 6.67 |
| G1755 | PD | 6.66 |
| G1444 | LTP1 | 6.63 |
| G843 | RBCS3 | 6.61 |
| G1481 | RBCS3 | 6.6 |
| G843 | AP1 | 6.59 |
| G551 | STM | 6.58 |
| G2108 | PG | 6.58 |
| G1053 | Cruciferin | 6.55 |
| G1809 | LTP1 | 6.51 |
| G1935 | LTP1 | 6.49 |
| G1791 | PG | 6.48 |
| G1954 | AP1 | 6.47 |
| G1785 | STM | 6.44 |
| G2132 | PG | 6.43 |
| G1808 | RBCS3 | 6.42 |
| G1007 | AP1 | 6.42 |
| G522 | AP1 | 6.41 |
| G159 | LTP1 | 6.41 |
| G558 | STM | 6.39 |
| G1650 | LTP1 | 6.38 |
| G2150 | LTP1 | 6.37 |
| G1784 | Cruciferin | 6.36 |
| G1462 | AP1 | 6.36 |
| G22 | STM | 6.34 |
| G1645 | PG | 6.33 |
| G2425 | LTP1 | 6.32 |
| G2137 | STM | 6.32 |
| G567 | AP1 | 6.31 |
| G558 | AS1 | 6.31 |
| G2294 | LTP1 | 6.31 |
| G1635 | LTP1 | 6.31 |
| G2294 | 35S | 6.31 |
| G1635 | PG | 6.3 |
| G187 | STM | 6.29 |
| G450 | STM | 6.28 |

TABLE 96
Experimental values for lycopene in or above 95% percentile

| | | Measured |
|---|---|---|
| GID | Promoter | Lycopene (ppm) |
| G2294 | LTP1 | 127.71 |
| G1635 | STM | 121.53 |
| G1638 | PG | 119.22 |
| G2417 | LTP1 | 114.96 |
| G328 | AP1 | 114.15 |
| G1324 | PG | 112.42 |
| G580 | 35S | 111.92 |
| G1273 | AP1 | 110.56 |
| G450 | STM | 109.97 |
| G881 | STM | 108.85 |
| G635 | PD | 108.82 |
| G1884 | LTP1 | 108.76 |
| G580 | STM | 106.67 |
| G237 | PD | 106.1 |
| G1078 | RBCS3 | 105.46 |
| G2108 | PG | 105.17 |
| G363 | LTP1 | 105.08 |
| G2072 | AS1 | 104.79 |
| G3 | RBCS3 | 104.6 |
| G2116 | PG | 103.61 |
| G2145 | RBCS3 | 103.06 |
| G675 | RBCS3 | 103 |
| G1226 | RBCS3 | 102.73 |
| G328 | PG | 102.46 |
| G22 | RBCS3 | 102.29 |
| G1755 | PD | 102.03 |
| G675 | STM | 101.65 |
| G2313 | AS1 | 100.96 |
| G843 | AP1 | 100.95 |
| G1007 | AP1 | 100.75 |
| G156 | AP1 | 100.37 |
| G435 | RBCS3 | 99.77 |
| G2505 | RBCS3 | 99.52 |
| G383 | STM | 99.38 |
| G159 | LTP1 | 99.05 |
| G2141 | PG | 98.78 |
| G558 | AS1 | 98.75 |
| G237 | PG | 98.4 |
| G190 | STM | 98.31 |
| G1903 | LTP1 | 98.26 |
| G675 | AS1 | 97.58 |
| G1462 | AP1 | 97.53 |
| G843 | 35S | 97.32 |

TABLE 97
Experimental values for plant volume in or above 95% percentile

| | | Measured |
|---|---|---|
| GID | Promoter | Volume (m³) |
| G1463 | RBCS3 | 0.5 |
| G1053 | AP1 | 0.46 |
| G812 | PD | 0.45 |
| G47 | LTP1 | 0.43 |
| G1950 | AP1 | 0.42 |
| G729 | Cruciferin | 0.41 |
| G1958 | Cruciferin | 0.41 |
| G1958 | AS1 | 0.4 |
| G1903 | LTP1 | 0.4 |
| G24 | Cruciferin | 0.4 |
| G1752 | Cruciferin | 0.39 |
| G1463 | STM | 0.38 |
| G1895 | AP1 | 0.37 |
| G2157 | STM | 0.36 |
| G2052 | AP1 | 0.36 |
| G1053 | AS1 | 0.36 |
| G729 | PG | 0.36 |
| G1950 | PD | 0.36 |
| G812 | Cruciferin | 0.35 |
| G1815 | 35S | 0.35 |
| G24 | AS1 | 0.35 |
| G1895 | AS1 | 0.34 |
| G1543 | LTP1 | 0.34 |
| G2052 | PD | 0.34 |
| G1640 | AS1 | 0.34 |
| G2052 | LTP1 | 0.34 |
| G270 | AS1 | 0.34 |
| G2425 | PD | 0.33 |
| G675 | 35S | 0.33 |
| G1903 | Cruciferin | 0.33 |
| G1504 | STM | 0.33 |
| G1755 | PD | 0.33 |
| G1635 | PD | 0.33 |
| G1444 | 35S | 0.33 |
| G2157 | AP1 | 0.33 |
| G1752 | 35S | 0.33 |
| G675 | AP1 | 0.33 |
| G1909 | Cruciferin | 0.33 |
| G1958 | 35S | 0.33 |
| G1752 | PG | 0.33 |
| G2157 | LTP1 | 0.33 |
| G937 | PG | 0.33 |
| G2425 | AP1 | 0.32 |
| G989 | STM | 0.32 |
| G989 | Cruciferin | 0.32 |
| G1755 | PG | 0.32 |
| G1865 | Cruciferin | 0.32 |
| G1950 | LTP1 | 0.32 |
| G1950 | PG | 0.32 |
| G1328 | RBCS3 | 0.32 |
| G1650 | AP1 | 0.32 |
| G558 | AP1 | 0.32 |
| G1635 | AP1 | 0.32 |
| G1897 | Cruciferin | 0.32 |
| G1444 | AS1 | 0.32 |
| G1543 | PG | 0.32 |
| G226 | Cruciferin | 0.32 |
| G2294 | 35S | 0.32 |

[0652] Of particular interest, seven genes (G558, G843, G1007, G1755, G22, G2294, and G522) showed high Brix levels when overexpressed with more than one promoter; five genes (G580, G237, G675, G843, and G328) resulted in high fruit lycopene when overexpressed with more than one promoter; while eighteen genes (G989, G1053, G1635, G675, G1444, G1950, G812, G1958, G729, G1752, G1755, G24, G1543, G1463, G2052, G2157, G1895, and G1903) resulted in larger vegetative plant size when overexpressed with more than one promoter. It is noteworthy that plants overexpressing G1950 under four different promoters rank in the top 95th percentile in size measurement while plants overexpressing G1958, G1752, G2052, or G2157 under three different promoters showed an increase in plant size. A few examples are discussed below.

[0653] G1950 (AKR family) is structurally related to NPR1, and thus may have a similar function in disease resistance. The enhanced size observed with AP1, LTP1, PD and PG promoters (in addition, the 35S::G1950 gene gave rise to increased size at 90th percentile) may be due to resistance to plant diseases in the field. It is also possible that enhanced expression of G1950 fosters enhanced growth, compared to wild-type controls, under stressful conditions that include biotic and abiotic stresses. Interestingly, Arabidopsis growth was unaffected in 35S::G1950 plants.

[0654] G1958 (GARP family) is known to be involved in regulation of a response to phosphate limitation. Over-expression of G1958 with 35S, AS1 and cruciferin promoters resulted in increased plant size, suggesting that phosphate levels in the field conditions were limiting and the improved response contributed to enhanced plant growth.

[0655] Plant size was also significantly increased with G2157 (AT-hook family) under the control of either the AP1, LTP1 and STM promoters. Plant size was also above the median with every other promoter tested, with the exception of the AS1 promoter (which has the median value). These results are consistent with increased plant growth associated with overexpression of a set of related AT-hook genes. Interestingly, in Arabidopsis, overexpression with the 35S promoter yielded significantly stunted plants with contorted leaves. This is consistent with possible involvement of auxin pathways (and perhaps an epinastic leaf response) in increased plant size. Other related AT-hook genes in Arabidopsis have been found to give mostly dwarfed transgenic plants, with occasional lines larger than wild type controls. These data support the role of AT-hook genes in the control of overall plant biomass.

[0656] Several genes may cause increases in plant size by conferring drought tolerance to plants in the field. For example, G675 expression under three different promoters (35S, AP1, and LTP1) ranked in the 95th percentile for size. This observation is supported by the Cruciferin promoter, PD, and PG promoters—all ranked above 75th percentile. Interestingly, G675 is also a lycopene hit under three different promoters (AS1, RBCS3, and STM), suggesting a relationship between the two traits. G675 is induced in roots by osmotic stress and ABA in Arabidopsis and it is possible it may be involved in general abiotic stress tolerance. G989 (related to SCR) also has produced increases in plant size under three promoters (Cruciferin and STM, 95 percentile; and LTP1, 90th percentile). G989 expression is induced by auxin, heat, drought, salt, osmotic stress. Others that have increased plant size such as G812 under multiple promoters (Cruciferin and PD, 95th percentile; LTP1, RBCS3, and STM, above 90th percentile) have shown drought tolerance directly when expressed under the 35S promoter.

[0657] Increased plant size can also be a result of effects on plant development. In the case of G1444 (GRF family), overexpression resulted in increased plant size under three different promoters (35S, AS1, and RBCS3). Ectopic expression in Arabidopsis of a large majority of the genes belonging to the GRF family results in a morphological phenotype analogous to that in tomato, i.e., increased leaf/cotyledon surface area and delayed flowering.

[0658] In some cases plant size was positively correlated with fruit yield. Examples include G226 under the Cruciferin promoter and G558 under the AP1 promoter, where both plant size and fruit yield were near the top. We have found that G226 confers drought tolerance and enhanced nitrogen utilization.

[0659] We have also identified genes that resulted in increases in Brix and lycopene with good or increased fruit yield. For example, expression of G22 under both the AP1 and STM promoters have resulted in high Brix levels while the yield of all five plants was excellent. G22 expression has been found to be responsive to a number of stress conditions in Arabidopsis. G1659 (DBP family) also induced increased lycopene when expressed under the control of the Cruciferin, AS1, and STM promoters. Cruciferin::G1659 and STM::G1659 plants were also noted to have a heavy, but somewhat late fruit-set. However, AS1::G1659 plants had a very heavy fruit-set that was not delayed developmentally.

[0660] Brix levels were increased by the expression of G1755 (AP2 family) under control of the AP1 and PD promoters, with a rank in the 95th percentile among all measurements. Lycopene content and plant size was also found to be in the 95th percentile of the PD::G1755 plants. The ability of G1755 to impact Brix, lycopene and plant size may prove to be commercially significant.

[0661] G1635 (MYB related) expression was correlated with high lycopene, large plant size and good fruit-set, when expressed under control of the STM promoter. Additionally, large size was also correlated with very high fruit-set in AP1::G1635 and PD::G1635 plants. These tomato plants appeared bushier, possibly due to an increase in lateral branching. A similar reduced apical dominance phenotype was previously documented in Arabidopsis. Finally, the fruit Brix levels for G1635 expressed under the LTP1 and PG promoters were close to the highest wild type level and ranked in the 95th percentile among all Brix measurements.

### Example IX

### Introduction of Polynucleotides into Dicotyledonous Plants and Cereal Plants

[0662] Transcription factor sequences listed in the Sequence Listing recombined into expression vectors, such as pMEN20 or pMEN65, may be transformed into a plant for the purpose of modifying plant traits. It is now routine to produce transgenic plants using most dicot plants (see Weissbach and Weissbach, (1989) supra; Gelvin et al. (1990); Herrera-Estrella et al. (1983); Bevan (1984); and Klee (1985)). Methods for analysis of traits are routine in the art and examples are disclosed above.

[0663] The cloning vectors of the invention may also be introduced into a variety of cereal plants. Cereal plants such as, but not limited to, corn, wheat, rice, sorghum, or barley, may also be transformed with the present polynucleotide sequences in pMEN20 or pMEN65 expression vectors for the purpose of modifying plant traits. For example, pMEN020 may be modified to replace the NptII coding region with the BAR gene of Streptomyces hygroscopicus that confers resistance to phosphinothricin. The KpnI and BglII sites of the Bar gene are removed by site-directed mutagenesis with silent codon changes.

[0664] The cloning vector may be introduced into a variety of cereal plants by means well known in the art such as, for example, direct DNA transfer or Agrobacterium tumefaciens-mediated transformation. It is now routine to produce transgenic plants of most cereal crops (Vasil (1994)) such as corn, wheat, rice, sorghum (Cassas et al. (1993)), and barley (Wan and Lemeaux (1994)). DNA transfer methods such as the microprojectile can be used for corn (Fromm et al. (1990); Gordon-Kamm et al. (1990); Ishida (1990)), wheat (Vasil et al. (1992); Vasil et al. (1993b); Weeks et al. (1993)), and rice (Christou (1991); Hiei et al. (1994); Aldemita and Hodges (1996); and Hiei et al. (1997)). For most cereal plants, embryogenic cells derived from immature scutellum tissues are the preferred cellular targets for transformation (Hiei et al. (1997); Vasil (1994)).

[0665] Vectors according to the present invention may be transformed into corn embryogenic cells derived from immature scutellar tissue by using microprojectile bombardment, with the A 88XB73 genotype as the preferred genotype (Fromm et al. (1990); Gordon-Kamm et al. (1990)). After microprojectile bombardment the tissues are selected on phosphinothricin to identify the transgenic embryogenic cells (Gordon-Kamm et al. (1990)). Transgenic plants are regenerated by standard corn regeneration techniques (Fromm et al. (1990); Gordon-Kamm et al. (1990)).

[0666] The vectors prepared as described above can also be used to produce transgenic wheat and rice plants (Christou (1991); Hiei et al. (1994); Aldemita and Hodges (1996); and Hiei et al. (1997)) that coordinately express genes of interest by following standard transformation protocols known to those skilled in the art for rice and wheat (Vasil et al. (1992); Vasil et al. (1993); and Weeks et al. (1993)), where the bar gene is used as the selectable marker.

### Example X

### Genes that Confer Significant Improvements to Diverse Plant Species

[0667] The function of specific orthologs of the sequences of the invention may be further characterized and incorporated into crop plants. The ectopic overexpression of these orthologs may be regulated using constitutive, inducible, or tissue specific regulatory elements. Genes that have been examined and have been shown to modify plant traits (including increasing lycopene, soluble solids and disease tolerance) encode orthologs of the transcription factor polypeptides found in the Sequence Listing, including, for example, G3380, G3381, G3383, G3392, G3393, G3430, G3431, G3444, G3445, G3446, G3447, G3448, G3449, G3450, G3490, G3515, G3516, G3517, G3518, G3519, G3520, G3524, G3643, G3644, G3645, G3646, G3647, G3649, G3651, G3656, G3659, G3660, G3661, G3717, G3718, G3735, G3736, G3737, G3739, G3794, G3841, G3843, G3844, G3845, G3846, G3848, G3852, G3856, G3857, G3858, G3864, and G3865. In addition to these sequences, it is expected that related polynucleotide sequences encoding polypeptides found in the Sequence Listing can also induce altered traits, including increasing lycopene, soluble solids and disease tolerance, when transformed into a considerable variety of plants of different species, and including dicots and monocots. The polynucleotide and polypeptide sequences derived from monocots (e.g., the rice sequences) may be used to transform both monocot and dicot plants, and those derived from dicots (e.g., the Arabidopsis and soy genes) may be used to transform either group, although it is expected that some of these sequences will function best if the gene is transformed into a plant from the same group as that from which the sequence is derived.

[0668] Transgenic plants are subjected to assays to measure plant volume, lycopene, soluble solids, disease tolerance, and fruit set according to the methods disclosed in the above Examples.

[0669] These experiments demonstrate that a significant number the transcription factor polypeptide sequences of the invention can be identified and shown to increased volume, lycopene, soluble solids and disease tolerance. It is expected that the same methods may be applied to identify and eventually make use of other members of the clades of the present transcription factor polypeptides, with the transcription factor polypeptides deriving from a diverse range of species.

[0670] All publications and patent applications mentioned in this specification are herein incorporated by reference to the same extent as if each individual publication or patent application was specifically and individually indicated to be incorporated by reference.

[0671] The present invention is not limited by the specific embodiments described herein. The invention now being fully described, it will be apparent to one of ordinary skill in the art that many changes and modifications can be made thereto without departing from the spirit or scope of the Claims. Modifications that become apparent from the foregoing description and accompanying figures fall within the scope of the following Claims.

### REFERENCES CITED

[0672] Aldemita and Hodges (1996) Planta 199:612-617
[0673] Ainley et al. (1993) Plant Mol. Biol. 22: 13-23
[0674] Altschul et al. (1990) J. Mol. Biol. 215: 403-410
[0675] Altschul (1993) J. Mol. Evol. 36: 290-300
[0676] Alvarez-Buylla et al. (2000) Proc. Natl. Acad. Sci. USA 97: 5328-5333
[0677] Ammirato et al., eds., (1984) Handbook of Plant Cell Culture—Crop Species, Macmillan Publ. Co., New York, N. Y.
[0678] An et al. (1988) Plant Physiol. 88: 547-552
[0679] Anderson and Young (1985) “Quantitative Filter Hybridisation.” In: Hames and Higgins, ed., Nucleic Acid Hybridisation, A Practical Approach. Oxford, IRL Press, 73-111
[0680] Angiosperm Phylogeny Group (1998) Ann. Missouri Bot. Gard. 84: 1-49
[0681] Aoyama et al. (1995) Plant Cell 7: 1773-1785
[0682] Assmann (2002) Plant Cell 14: S355-S373
[0683] Ausubel et al. (1997) Short Protocols in Molecular Biology, John Wiley & Sons, New York, N.Y., unit 7.7
[0684] Ausubel et al., eds. (1998) Current Protocols in Molecular Biology, Greene Publishing Associates, Inc. and John Wiley & Sons, Inc., (supplemented through 2000) (“Ausubel”)
[0685] Baerson et al. (1993) Plant Mol. Biol. 22: 255-267
[0686] Baerson et al. (1994) Plant Mol. Biol. 26: 1947-1959
[0687] Bairoch et al. (1997) Nucleic Acids Res. 25: 217-221
[0688] Bartley and Scolnik (1995) Plant Cell 7: 1027-1038
[0689] Baumann et al., (1999) Plant Cell 11: 323-334
[0690] Beaucage et al. (1981) Tetrahedron Letters 22: 1859-1869
[0691] Berger and Kimmel (1987) Guide to Molecular Cloning Techniques, Methods in Enzymology, vol. 152 Academic Press, Inc., San Diego, Calif. (“Berger and Kimmel”)
[0692] Berrocal-Lobo et al. (2002) Plant J. 29: 23-32
[0693] Bevan (1984) Nucleic Acids Res. 12: 8711-8721
[0694] Bhattacharjee et al. (2001) Proc Natl. Acad. Sci., USA, 98: 13790-13795
[0695] Bolle (2003) Planta 218: 683-692
[0696] Borevitz et al. (2000) Plant Cell 12: 2383-2394
[0697] Boss and Thomas (2002) Nature, 416: 847-850
[0698] Breen and Crouch (1992) Plant Mol. Biol. 19:1049-1055
[0699] Bruce et al. (2000) Plant Cell, 12: 65-79
[0700] Buchel et al. (1999) Plant Mol. Biol. 40: 387-396
[0701] Bulyk et al. (1999) Nature Biotechnol. 17: 573-577
[0702] Brummelkamp et al. (2002) Science 296:550-553
[0703] Byrne et al (2000) Nature 408: 967-971
[0704] Cassas et al. (1993) Proc. Natl. Acad. Sci. 90: 11212-11216
[0705] Cao et al. (1997) Cell 88: 57-63
[0706] Chase et al. (1993) Ann. Missouri Bot. Gard. 80: 528-580
[0707] Cheng et al. (1994) Nature 369: 684-685
[0708] Chern et al. (2001)Plant J. 27: 101-113
[0709] Chien et al. (1991) Proc. Natl. Acad. Sci. 88: 9578-9582
[0710] Chrispeels et al. (2000) Plant Mol. Biol. 42: 279-290
[0711] Christou (1991) Bio/Technology 9: 957-962
[0712] Constans (2002) The Scientist 16: 36
[0713] Corona et al. (1996) Plant J. 9: 505-512
[0714] Coupland (1995) Nature 377: 482-483
[0715] Crowley et al. (1985) Cell 43: 633-641
[0716] Cunningham and Gantt (1998) Annu. Rev. Plant Physiol. Plant Mol. Biol. 49: 557-583
[0717] Daly et al. (2001) Plant Physiol. 127: 1328-1333
[0718] de Pater et al (1996) Mol. Gen. Genet. 250: 237-239
[0719] Denekamp and Smeekens (2003) Plant Physiol. 132: 1415-1423
[0720] Doolittle, ed., (1996) Methods Enzymol., vol. 266, “Computer Methods for Macromolecular Sequence Analysis”, Academic Press, Inc., San Diego, Calif., USA
[0721] Di Laurenzio et al. (1996) Cell 86:423-433
[0722] Eddy (1996) Curr. Opin. Str. Biol. 6: 361-365
[0723] Ellis et al. (2002) Plant Cell 14: 1557-1566
[0724] Eulgem et al. (2000) Trends Plant Sci. 5: 199-206
[0725] Eyal et al. (1992) Plant Mol. Biol. 19: 589-599
[0726] Fan and Dong (2002) Plant Cell 14: 1377-1389
[0727] Feng and Doolittle (1987) J. Mol. Evol. 25: 351-360
[0728] Fire et al. (1998) Nature 391: 806-811
[0729] Fluhr et al (1986) EMBO J. 5: 2063-2071
[0730] Foley et al. (1993) Plant J. 3: 669-679
[0731] Fowler and Thomashow (2002) Plant Cell 14: 1675-1690
[0732] Fraley et al. (1983) Proc. Natl. Acad. Sci. 80: 48034807
[0733] Frary et al. (2000) Science 289: 85-88
[0734] Fraser et al. (1994) Plant Physiol. 105: 405-413
[0735] Fraser et al. (2002) Proc. Natl. Acad. Sci. USA 99: 1092-1097
[0736] Fridman et al. (2002) Mol. Genet. Genomics 66: 821-826
[0737] Fromm et al. (1985) Proc. Natl. Acad. Sci. 82: 5824-5828
[0738] Fromm et al. (1989) Plant Cell 1: 977-984
[0739] Fromm et al. (1990) Bio/Technol. 8: 833-839
[0740] Fu et al. (2001) Plant Cell 13: 1791-1802
[0741] Fukaki et al. (2002) Plant J. 29: 153-168
[0742] Gampala et al. (2001) J. Biol. Chem. 277: 1689-1694
[0743] Gan and Amasino (1995) Science 270: 1986-1988)
[0744] Gatz (1997) Annu. Rev. Plant Physiol. Plant Mol. Biol. 48: 89-108
[0745] Gelvin et al. (1990) Plant Molecular Biology Manual, Kluwer Academic Publishers
[0746] Giniger and Ptashne (1987) Nature 330: 670-672
[0747] Giovannoni (2001) Annu. Rev. Plant Physiol. Plant Mol. Biol. 52: 725-749
[0748] Gilmour et al. (1998) Plant J. 16: 433-442
[0749] Gocal et al. (2001) Plant Physiol. 127:1682-1693
[0750] Goodrich et al. (1993) Cell 75: 519-530
[0751] Gordon-Kamm (1990) Plant Cell 2: 603-618
[0752] Guevara-Garcia (1998) Plant Mol. Biol. 38: 743-753
[0753] Guyer et al. (1998) Genetics 149: 633639
[0754] Hames and Higgins, eds. (1985) Nucleic Acid Hybridisation: A Practical Approach, IRL Press, Oxford, U. K.
[0755] Hammond et al. (2001) Nature Rev Gen 2: 110-119
[0756] Harlow and Lane (1988), Antibodies: A Laboratory Manual, Cold Spring Harbor Laboratory, New York
[0757] He et al. (2000) Transgenic Res. 9: 223-227
[0758] Heim et al. (2003) Mol. Biol. Evol. 20: 735-747
[0759] Hein (1990) Methods Enzymol. 183: 626-645
[0760] Hempel et al. (1997) Development 124: 3845-3853
[0761] Henikoff and Henikoff (991) Nucleic Acids Res. 19: 6565-6572
[0762] Henikoff and Henikoff (1992) Proc. Natl. Acad. Sci. 89: 10915-10919
[0763] Herrera-Estrella et al. (1983) Nature 303: 209
[0764] Hiei et al. (1994) Plant J. 6:271-282
[0765] Hiei et al. (1997) Plant Mol. Biol. 35:205-218
[0766] Higgins and Sharp (1988) Gene 73: 237-244
[0767] Higgins et al. (1996) Methods Enzymol. 266: 383-402
[0768] Hohn et al. (1982) Molecular Biology of Plant Tumors Academic Press, New York, N.Y., pp. 549-560
[0769] Horsch et al. (1984) Science 233: 496-498
[0770] Ichikawa et al. (1997) Nature 390 698-701
[0771] Isaacson et al. (2002) Plant Cell 14: 333-342
[0772] Isalan et al. (2001) Nature Biotechnol. 19: 656-660
[0773] Ishida (1990) Nature Biotechnol 14:745-750
[0774] Ishida et al. (1996) Nature Biotechnol. 14: 745-750
[0775] Izant and Weintraub (1985) Science 229: 345-352
[0776] Jakoby et al. (2002) Trends Plant Sci. 7: 106-111
[0777] Jaglo et al. (1998) Plant Physiol 127: 910-917
[0778] Jaglo et al. (2001) Plant Physiol. 127: 910-917
[0779] Jones et al. (1992) Transgenic Res. 1: 285-297
[0780] Kaiser et al. (1995) Plant Mol. Biol. 28: 231-243
[0781] Kakimoto et al. (1996) Science 274: 982-985
[0782] Kaneko et al. (1999) DNA Res. 6: 183-195
[0783] Kang et al. (2000) Plant J. 21: 329-339
[0784] Karlin and Altschul (1993) Proc. Natl. Acad. Sci. 90: 5873-5787
[0785] Kashima et al. (1985) Nature 313:402-404
[0786] Kawata et al. (1992) Nucleic Acids Res. 20: 1141
[0787] Kempin et al. (1997) Nature 389: 802-803
[0788] Kerstetter (2001) Nature 411: 706-709
[0789] Kim and Wold (1985) Cell 42: 129-138
[0790] Kim et al. (2001) Plant J. 25: 247-259
[0791] Kim et al. (2003) Plant J. 36: 94-104
[0792] Kimmel (1987) Methods Enzymol. 152: 507-511
[0793] Klann et al. (1996) Plant Physiol. 112: 1321-1330
[0794] Klee (1985) Bio/Technology 3: 637-642
[0795] Klein et al. (1987) Nature 327: 70-73
[0796] Knaap et al. (2000) Plant Physiol. 122: 695-704
[0797] Koncz et al. (1992a) Methods in Arabidopsis Research, World Scientific, River Edge, N.J.
[0798] Koncz et al. (1992b) Plant Molec. Biol. 20: 963-976
[0799] Kop et al. (1999) Plant Mol. Biol. 39: 979-990
[0800] Kosugi and Ohashi (2002) Plant J. 29: 45-59
[0801] Kranz et al. (1998)Plant J. 16:263-276
[0802] Ku et al. (2000) Proc. Natl. Acad. Sci. 97: 9121-9126
[0803] Kuhlemeier et al. (1989) Plant Cell 1: 471-478
[0804] Kyozuka and Shimamoto (2002) Plant Cell Physiol. 43: 130-135
[0805] Ledger et al. (2001) Plant J. 26: 15-22
[0806] Lee (1998) Proc. Natl. Acad. Sci. USA 95: 2001-2004
[0807] Lee et al. (2002) Genome Res. 12: 493-502
[0808] Lehming et al (1987) EMBO J. 6: 3145-3153
[0809] Lichtenthaler (1999) Annu. Rev. Plant. Physiol. Plant. Mol. Biol. 50: 47-65
[0810] Lichtenthaler et al. (1997) FEBS Lett. 400: 271-274
[0811] Lin et al. (1991) Nature 353: 569-571
[0812] Liu et al. (2001) J. Biol. Chem. 276: 11323-11334
[0813] Liu et al. (2002) Proc. Natl. Acad. Sci. USA 99: 13302-13306
[0814] Long and Barton (1998) Development 125: 3027-3035
[0815] Long and Barton (2000) Dev. Biol. 218: 341-353
[0816] Lu and Ferl (1995) Plant Physiol. 109: 723
[0817] Ma and Ptashne (1987) Cell 51: 113-119
[0818] Mandel et al. (1992a) Nature 360: 273-277
[0819] Mandel et al. (1992b) Cell 71: 133-143
[0820] Manners et al. (1998) Plant Mol. Biol. 38: 1071-1080
[0821] Matthes et al. (1984) EMBO J. 3: 801-805
[0822] Mehta et al. (2002) Nature Biotechnol. 20: 613-618
[0823] Melton (1985) Proc. Natl. Acad. Sci. 82: 144-148
[0824] Meyers (1995) Molecular Biology and Biotechnology, Wiley VCH, New York, N.Y., p 856-853
[0825] Miao et al. (1995) Plant J. 7: 887-896
[0826] Montgomery et al. (1993) Plant Cell 5: 1049-1062
[0827] Moore et al. (1998) Proc. Natl. Acad. Sci. 95: 376-381
[0828] Moore et al. (2002) J. Exp. Bot. 53: 2023-2030
[0829] Mount (2001) in Bioinformatics: Sequence and Genome Analysis Cold Spring Harbor Laboratory Press, Cold Spring Harbor, N.Y., page 543
[0830] Müller et al. (2001) Plant J. 28: 169-179
[0831] Mullis et al. (1990) PCR Protocols A Guide to Methods and Applications (Innis et al. eds) Academic Press Inc. San Diego, Calif.
[0832] Nandi et al. (2000) Curr. Biol. 10: 215-218
[0833] Needleman and Wunsch (1970) J. Mol. Biol. 48: 443-453
[0834] Nesi et al. (2002). Plant Cell 14: 2463-2479
[0835] Nicholass et al. (1995) Plant Mol. Biol. 28: 423-435
[0836] Nover et al. (1996) Cell Stress Chaperones 1:215-223
[0837] Odell et al. (1985) Nature 313: 810-812
[0838] Odell et al. (1994) Plant Physiol. 106: 447-458
[0839] Ohl et al. (1990) Plant Cell 2: 837-848
[0840] Oeller et al. (1991) Science 254: 437-439
[0841] Okamuro et al. (1997) Proc. Natl. Acad. Sci. USA 94: 7076-7081
[0842] O'Neil et al. (1990) Science 250: 646-651
[0843] Ooka et al. (2003). DNA Res. 10: 239-247
[0844] Ori et al. (2000) Development 127: 5523-5532
[0845] Paddison et al. (2002) Genes & Dev. 16:948-958
[0846] Pearson and Lipman (1988) Proc. Natl. Acad. Sci. 85: 2444-2448
[0847] Peng et al. (1997) Genes Development 11: 3194-3205
[0848] Peng et al. (1999) Nature 400: 256-261
[0849] Peng et al. (1999) Nature 400: 256-261
[0850] Piazza et al. (2002) Plant Physiol. 128: 1077-1086
[0851] Preiss et al. (1985) Nature 313: 27-32
[0852] Putterill et al. (1997) Plant Physiol. 114: 396
[0853] Ratcliffe et al. (2001) Plant Physiol. 126: 122-132
[0854] Remm et al. (2001) J. Mol. Biol. 314: 1041-1052
[0855] Riechmann et al. (2000) Science 290: 2105-2110
[0856] Rieger et al. (1976) Glossary of Genetics and Cytogenetics: Classical and Molecular, 4th ed., Springer Verlag, Berlin
[0857] Ringli and Keller (1998) Plant Mol. Biol. 37: 977-988
[0858] Robson et al. (2001) Plant J. 28: 619-631
[0859] Ronen et al. (1999) Plant J. 17: 341-351
[0860] Rose and Bennett (1999) Trends Plant Sci. 4: 176-183
[0861] Rosenberg et al. (1985) Nature 313: 703-706
[0862] Rubio et al. (2001) Genes Devel. 15: 2122-2133
[0863] Sabatini et al (2003) Genes Dev. 17: 354-358
[0864] Sadowski et al. (1988) Nature 335: 563-564
[0865] Sambrook et al. (1989) Molecular Cloning: A Laboratory Manual. 2nd Ed., Vol. 1-3, Cold Spring Harbor Laboratory, Cold Spring Harbor, N.Y. (“Sambrook”)
[0866] Sakuma et al. (2002) Biochem. Biophys. Res. Commun. 290: 998-1009
[0867] Schaffner and Sheen (1991) Plant Cell 3: 997-1012
[0868] Schellmann et al. (2002) EMBO J. 21: 5036-5046
[0869] Sharp (1999) Genes and Development 13: 139-141
[0870] Shewmaker et al. (1999) Plant J. 20: 401-412
[0871] Shi et al. (1998) Plant Mol. Biol. 38: 1053-1060
[0872] Shimamoto et al. (1989) Nature 338: 274-276
[0873] Shpaer (1997) Methods Mol. Biol. 70: 173-187
[0874] Siebertz et al. (1989) Plant Cell 1: 961-968
[0875] Sjodahl et al. (1995) Planta 197: 264-271
[0876] Smith and Waterman (1981) Adv. Appl. Math. 2: 482-489
[0877] Smith et al. (1988) Nature, 334: 724-726
[0878] Smith et al. (1990) Plant Mol. Biol. 14: 369-379
[0879] Smith et al. (1992) Protein Engineering 5: 35-51
[0880] Sonnhammer et al. (1997) Proteins 28: 405-420
[0881] Stemmer (1994a) Nature 370: 389-391
[0882] Stemmer (1994b) Proc. Natl. Acad. Sci. 91: 10747-10751
[0883] Stracke et al. (2001) Curr. Opin. Plant Biol. 4: 447-456
[0884] Suzuki et al. (2001) Plant J. 28: 409-418
[0885] Tague and Goodman (1995) Plant Mol. Biol. 28: 267-279
[0886] Taylor and Scheuring (1994) Mol. Gen. Genet. 243: 148-157
[0887] Thoma et al. (1994) Plant Physiol. 105: 35-45
[0888] Thompson et al. (1994) Nucleic Acids Res. 22: 46734680
[0889] Timmons and Fire (1998) Nature 395: 854
[0890] Toledo-Ortiz et al. (2003) Plant Cell 15: 1749-1770
[0891] Tudge (2000) in The Variety of Life, Oxford University Press, New York, N.Y., pp. 547-606
[0892] Vasil et al. (1990) Bio/Technol. 8: 429-434
[0893] Vasil et al. (1992) Bio/Technol. 10:667-674
[0894] Vasil (1993a) Bio/Technology 10: 667674
[0895] Vasil et al. (1993b) Bio/Technol. 11:1553-1558
[0896] Vasil (1994) Plant Mol. Biol. 25: 925-937
[0897] Vrebalov et al. (2002) Science 296: 343-346
[0898] Wada et al. (1997) Science 277: 1113-1116
[0899] Wahl and Berger (1987) Methods Enzymol. 152: 399-407
[0900] Wan and Lemeaux (1994) Plant Physiol. 104: 37-48
[0901] Wanner and Gruissem (1991) Plant Cell 3: 1289-1303
[0902] Weeks et al. (1993) Plant Physiol. 102: 1077-1084
[0903] Weigel and Nilsson (1995) Nature 377: 482-500
[0904] Weissbach and Weissbach (1989) Methods for Plant Molecular Biology, Academic Press
[0905] Wilkinson et al. (1995) et al. Science 270: 1807-1809
[0906] Wilkinson et al. (1997) Nat. Biotechnol. 15: 444-447
[0907] Willmott et al. (1998) Plant Molec. Biol. 38: 817-825
[0908] Winans (1992) Microbiol. Rev. 56: 12-31
[0909] Wu, ed. (993) Methods Enzymol. (vol. 217, Academic Press, San Diego)
[0910] Wysocka-Diller et al (2000) Development 127: 595-603
[0911] Xu et al. (2001) Proc. Natl. Acad. Sci., USA, 98: 15089-15094
[0912] Zamore (2001) Nature Struct. Biol., 8: 746-750
[0913] Zhang et al. (1999) Proc. Natl. Acad. Sci. USA 96: 6523-6528
[0914] Zhang et al. (2000) J. Biol. Chem. 275: 33850-33860

The application's sequence listing, which the Patent Office published only in electronic form, follows.

SEQUENCE LISTING (850 sequences)

SEQ ID NO: 1 - DNA, 759 bp, Arabidopsis thaliana
  G3
gtttgtcttttatcaatggaaagagaacaagaagagtctacgatgagaaagagaaggcagccacctcaagaagaagtgcctaaccacgtggctacaaggaagccgtacagagggatacggaggaggaagtggggcaagtgggtggctgagattcgtgagcctaacaaacgctcacggctttggcttggctcttacacaaccgatatcgccgccgctagagcctacgacgtggccgtcttctacctccgtggcccctccgcacgtctcaacttccctgatcttctcttgcaagaagaggaccatctctcagccgccaccaccgctgacatgcccgcagctcttataagggaaaaagcggcggaggtcggcgccagagtcgacgctcttctagcttctgccgctccttcgatggctcactccactccgccggtaataaaacccgacttgaatcaaatacccgaatccggagatatatagtcaatttatatacatgtagtttgttttgtttgattagaagattacatttacatacaagatacacatagatactggaaaatataggtatgtatacattcataaattatcttatgtatcaaagaattttatagattctgattagctttttgtttttgtttttgataagaactctgattagttgtccggagacaaaaccggctaagagcaatccatgagaagctagcgagtgttttttagttcaagttgtaatataaatgcatattaattctttagtaattttgt

SEQ ID NO: 2 - protein, 153 aa, Arabidopsis thaliana
  G3 polypeptide
MEREQEESTMRKRRQPPQEEVPNHVATRKPYRGIRRRKWGKWVAEIREPNKRSRLWLGSYTTDIAAARAYDVAVFYLRGPSARLNFPDLLLQEEDHLSAATTADMPAALIREKAAEVGARVDALLASAAPSMAHSTPPVIKPDLNQIPESGDI

SEQ ID NO: 3 - DNA, 913 bp, Arabidopsis thaliana
  G22
agaaaacatctctcactctctaaaatacacactctcatcaaaaaccttctcttcggttcagaagcattcaagaatccattatgagctcatctgattccgttaataacggcgttaactcacggatgtacttccgtaacccgagtttcagcaacgttatcttaaacgataactggagcgacttgccgttaagtgtcgacgattctcaagacatggctatttacaacactctccgtgatgccgttagctccggctggacaccctccgttcctcccgttacctctccggcggaggaaaataagcctccggcgacgaaggcgagtggctcacacgcgccgaggcagaaggggatgcagtacagaggagtgaggaggaggccgtgggggaaattcgcggcggagattagggatccgaagaagaacggagctagggtttggctcgggacttacgagacgccggaggacgcggcggtggcgtacgaccgagcggcgtttcagctcagaggatcgaaagctaagctgaattttccgcatttgattggttcttgtaagtatgagccggttaggattaggcctcgccgtcgctcgccggaaccgtcagtctccgatcagttaacgtcggagcagaagagggaaagccacgtggatgacggcgagtctagtttggttgtaccggagttggatttcacggtggatcagttttacttcgatggtagtttattaatggaccaatcagaatgttcttattctgataatcggatataattagttttaagattaagcaaaatttgtccaacgagttttgctgtatgaaatatctatcgatgactcaacaggttttgatcatgatcatatgtaatgtgatggaaattaaatattgacgtttgtttttttgttgtaaaaaaaaaaaaaaaaaa

SEQ ID NO: 4 - protein, 226 aa, Arabidopsis thaliana
  G22 polypeptide
MSSSDSVNNGVNSRMYFRNPSFSNVILNDNWSDLPLSVDDSQDMAIYNTLRDAVSSGWTPSVPPVTSPAEENKPPATKASGSHAPRQKGMQYRGVRRRPWGKFAAEIRDPKKNGARVWLGTYETPEDAAVAYDRAAFQLRGSKAKLNFPHLIGSCKYEPVRIRPRRRSPEPSVSDQLTSEQKRESHVDDGESSLVVPELDFTVDQFYFDGSLLMDQSECSYSDNRI

SEQ ID NO: 5 - DNA, 957 bp, Arabidopsis thaliana
  G24
cggacgcgtgggcaaatattaaaataaaaagtgtcggtgaattctcaatctttgtcttctttcgtcgtctctttaaaactcctccgtccctccttattatgtaaccgtctcgccgtcaaattttcaaaatctctccctccgttcataaacccagatcgaaatttatggttttgtaatttttttaccggcggttatggagacggaagcggcggtgacagcgacggttacggcggcgacgatggggattgggacgaggaagagagatctgaaaccgtataaaggaatacgaatgaggaaatgggggaaatgggtggcggagatacgggaaccgaataagagatcaaggatctggttaggttcttatgcgacgcctgaagcggcggcgagagcttacgacactgctgttttttacctccgtggtccttcagcgaggcttaattttccggagcttttggctggacttactgtttctaacggcggaggaagaggtggtgatttatcggcggcgtatattaggagaaaagcggcggaggttggtgctcaggttgatgcgcttggagcgacggtggttgtgaataccggcggcgagaatcgcggtgattacgagaagattgagaattgtcgtaagagcggtaacgggtcattggaacgggtcgatttgaataaattacccgacccggaaaattcggatggtgatgatgacgaatgtgtgaaaagaagatagaaaaaataaaaagtagttgtagaaggagagacgagaatgtttgtctttaagatgcgctgttgccgctaacatgcgctttcgattttagtgttaaacatgcgcctccattgtttttgggttttgttttcgtcgtcgataatcaaagattttaaaacacaattctcaaatttttcacttgttacaaactagatttgcatgatctttgtattaacgaataacgattaagtcctaaa

SEQ ID NO: 6 - protein, 176 aa, Arabidopsis thaliana
  G24 polypeptide
METEAAVTATVTAATMGIGTRKRDLKPYKGIRMRKWGKWVAEIREPNKRSRIWLGSYATPEAAARAYDTAVFYLRGPSARLNFPELLAGLTVSNGGGRGGDLSAAYIRRKAAEVGAQVDALGATVVVNTGGENRGDYEKIENCRKSGNGSLERVDLNKLPDPENSDGDDDECVKRR

SEQ ID NO: 7 - DNA, 785 bp, Arabidopsis thaliana
  G47
cttcttcttcacatcgatcatcatacaacaacaaaaaatggattacagagaatccaccggtgaaagtcagtcaaagtacaaaggaatccgtcgtcggaaatggggcaaatgggtatcagagattagagttccgggaactcgtgaccgtctctggttaggttcattctcaacagcagaaggtgccgccgtagcacacgacgttgctttcttctgtttacaccaacctgattctttagaatctctcaatttccctcatttgcttaatccttcactcgtttccagaacttctccgagatctatccagcaagctgcttctaacgccggcatggccattgacgccggaatcgtccacagtaccagcgtgaactctggatgcggagatacgacgacgtattacgagaatggagctgatcaagtggagccgttgaatatttcagtgtatgattatctgggcggccacgatcacgtttgatttatctcgacggtcatgatcacgtttgatcttcttttgagtaagattttgtaccataatcaaaacaggtgtggtgctaaaatcttactcaaaacaagattaggtaccacagagaaacaatcaaatggttgtgaatatacattataaggttttgattaatgtttgtttcactgatttagtgaagtttggtccattgtatacaaatctattcaagaaacctagcgcgagatcatgtttcgtgattgaagattgagatttttaagtattcgtaatatttttgtaaaatacaaataaaaaaaaaaaaaaaaaaaaa

SEQ ID NO: 8 - protein, 144 aa, Arabidopsis thaliana
  G47 polypeptide
MDYRESTGESQSKYKGIRRRKWGKWVSEIRVPGTRDRLWLGSFSTAEGAAVAHDVAFFCLHQPDSLESLNFPHLLNPSLVSRTSPRSIQQAASNAGMAIDAGIVHSTSVNSGCGDTTTYYENGADQVEPLNISVYDYLGGHDHV

SEQ ID NO: 9 - DNA, 947 bp, Arabidopsis thaliana
  misc_feature (924)..(925): n is a, c, g, or t
  misc_feature (929)..(929): n is a, c, g, or t
  misc_feature (932)..(933): n is a, c, g, or t
  G156
aggaagagggagccactcataagaggaagaagagagagatgggtagagggaagatagagataaagaagatagagaatcagacggcgaggcaagtgaccttctccaagagaagaactggtcttataaagaagactcgtgagctctctattctctgtgacgctcacatcggtctcatcgtcttctcagccaccggaaagctttccgagttctgctccgaacagaacaggatgcctcaactcattgaccgatacttgcataccaacggattgcgacttcctgatcatcatgacgaccaggagcaattgcaccatgagatggaactactaagaagagagacatgtaaccttgagcttcgtctgcgtccattccatggacatgacttagcctccattcctcctaatgagcttgacggactcgagagacagctagaacattctgtcctcaaagtccgtgagcgtaagaggaggatgctagaagaagataacaacaacatgtaccgttggcttcatgagcatcgtgcagcgatggagtttcaacaagctgggatagataccaaaccaggggagtatcaacagtttatagagcagcttcagtgctataaaccaggggagtatcagcagtttctagagcagcagcaacaacaaccaaacagcgttcttcagcttgctacacttccttctgagattgatcctacttacaatctccagcttgctcagcctaatcttcaaaacgatccaacggcccagaatgattaatacaattctcaatagatatctactctttctttatggagacagattcatgaacttttattacctatattttgataagccagtgtcttcttttgtgtggctatggaaaccttgtttaaagcacaatgcacttgagttcttggttatataattaatcatcattattacatannaaanaannaaaaaaaaaaaaaa

SEQ ID NO: 10 - protein, 238 aa, Arabidopsis thaliana
  G156 polypeptide
MGRGKIEIKKIENQTARQVTFSKRRTGLIKKTRELSILCDAHIGLIVFSATGKLSEFCSEQNRMPQLIDRYLHTNGLRLPDHHDDQEQLHHEMELLRRETCNLELRLRPFHGHDLASIPPNELDGLERQLEHSVLKVRERKRRMLEEDNNNMYRWLHEHRAAMEFQQAGIDTKPGEYQQFIEQLQCYKPGEYQQFLEQQQQQPNSVLQLATLPSEIDPTYNLQLAQPNLQNDPTAQND

SEQ ID NO: 11 - DNA, 1132 bp, Arabidopsis thaliana
  G159
tcataattttgtttcttataaatcactatagaaaaaaatattttctttcaatgctcaaaacatattttgtaaaatttagtctataaatacaaatacctattatctctaatataatcaactcgcttttctttttctgttcaaaacatctcgaaaatggcgagaaagaatcttggtcgtagaaaaatagagttggtaaaaatgaccaacgaatcaaaccttcaagttacgttttcaaaaagaagatctggtcttttcaaaaaaggcagtgaactttgcaccttatgtgacgcggaaattgcgataatcgtgttttcaccctcgggaaaagcatactcttttggtcatccaaatgttaacaagttacttgaccactctttagggcgtgttataagacacaacaacacaaactttgctgaaagccgcacaaagctccgtattcaaatgctcaatgagtctttaactgaggtgatggctgaaaaagaaaaagaacaagagaccaagcagtcaatagtccaaaatgaaagagagaacaaggacgctgagaagtggtggaggaactctccaacagaactcaacttagctcaatcaacttccatgaaatgtgatcttgaagctttgaagaaggaagttgatgaaaaagtcgctcaacttcatcatagaaacctaaacttctatgttggaagttctagcaatgttgctgctccagcagctgttagtggtggtaatatctccacaaaccatggtttctttgatcaaaacggaaactctacttctgctccaacactgccgtttggatttaatgttatgaatcgcacaccagctgggtacaacagttaccaactccaaaaccaggaggttaaacaagtccatcctcagtattgggctcgttactattagtctatctctctcgttgtgtgactttttaagtctccaatagtttgttctgctttttgttttgtttttgtttgttgttgttgttgttgtcgggcttttaattaagtctcgagtcaactagtttcttgtttcttttcgttatactttgtcttgtagctttatatcattttcttgtggaatatgagtaagctatatgaagtttcatattaaaaaaaaaaaaaaaaaaaaaaaaaaaaaa

SEQ ID NO: 12 - protein, 247 aa, Arabidopsis thaliana
  G159 polypeptide
MARKNLGRRKIELVKMTNESNLQVTFSKRRSGLFKKGSELCTLCDAEIAIIVFSPSGKAYSFGHPNVNKLLDHSLGRVIRHNNTNFAESRTKLRIQMLNESLTEVMAEKEKEQETKQSIVQNERENKDAEKWWRNSPTELNLAQSTSMKCDLEALKKEVDEKVAQLHHRNLNFYVGSSSNVAAPAAVSGGNISTNHGFFDQNGNSTSAPTLPFGFNVMNRTPAGYNSYQLQNQEVKQVHPQYWARYY

SEQ ID NO: 13 - DNA, 1136 bp, Arabidopsis thaliana
  G187
tagacctcttaggaaaaaaacctaaaaacctaatccccaaacctaaaaggcttatctcatctcttcttctttgtcttctttactctttttttacctctctcttcattgttcttcaccatgtctaatgaaaccagagatctctacaactaccaatacccttcatcgttttcgttgcacgaaatgatgaatctgcctacttcaaatccatcttcttatggaaacctcccatcacaaaacggttttaatccatctacttattccttcaccgattgtctccaaagttctccagcagcgtatgaatctctacttcagaaaacttttggtctttctccctcttcctcagaggttttcaattcttcgatcgatcaagaaccgaaccgtgatgttactaatgacgtaatcaatggtggtgcatgcaacgagactgaaactagggtttctccttctaattcttcctctagtgaggctgatcaccccggtgaagattccggtaagagccggaggaaacgagagttagtcggtgaagaagatcaaatttccaaaaaagttgggaaaacgaaaaagactgaggtgaagaaacaaagagagccacgagtctcgtttatgactaaaagtgaagttgatcatcttgaagatggttatagatggagaaaatacggccaaaaggctgtaaaaaatagcccttatccaaggagttactatagatgtacaacacaaaagtgcaacgtgaagaaacgagtggagagatcgttccaagatccaacggttgtgattacaacttacgagggtcaacacaaccacccgattccgactaatcttcgaggaagttctgccgcggctgctatgttctccgcagacctcatgactccaagaagctttgcacatgatatgtttaggacggcagcttatactaacggcggttctgtggcggcggctttggattatggatatggacaaagtggttatggtagtgtgaattcaaaccctagttctcaccaagtgtatcatcaagggggtgagtatgagctcttgagggagatttttccttcaattttctttaagcaagagccttgatcgatcattgttataactacatatattatatatattgagagagagaggtagagaaaaaaaaa

SEQ ID NO: 14 - protein, 318 aa, Arabidopsis thaliana
  G187 polypeptide
MSNETRDLYNYQYPSSFSLHEMMNLPTSNPSSYGNLPSQNGFNPSTYSFTDCLQSSPAAYESLLQKTFGLSPSSSEVFNSSIDQEPNRDVTNDVINGGACNETETRVSPSNSSSSEADHPGEDSGKSRRKRELVGEEDQISKKVGKTKKTEVKKQREPRVSFMTKSEVDHLEDGYRWRKYGQKAVKNSPYPRSYYRCTTQKCNVKKRVERSFQDPTVVITTYEGQHNHPIPTNLRGSSAAAAMFSADLMTPRSFAHDMFRTAAYTNGGSVAAALDYGYGQSGYGSVNSNPSSHQVYHQGGEYELLREIFPSIFFKQEP

SEQ ID NO: 15 - DNA, 1034 bp, Arabidopsis thaliana
  G190
gaaaaagaaaacaaacaagaaacacatacacacacacacaagttcactatactctatggaaatgaactccccacacgaaaaggcggtgcaagctatccgttatggccatagctgcgccatgcggttgaagaggcggctcaaccatccaatggctgatggtggaccgctttcaagttatgatcttgctaaatcgatcgttgaaagtttttccaatgccatttcaatcttatctgctaaaccagaaaccgaagatgatcagttttctgatttatcttctagggattcttctcctcctccacaggggagcccctccaagaaaagaaagattgatagtacaaattcaagtgagaattggagggacgattcaccggatccgatttactacgacgggtatctttggaggaaatatggtcaaaagagtataaaaaaatctaatcaccaaaggagttactatagatgttcttacaacaaagatcataactgcgaagcaagaaagcatgaacaaaagatcaaagacaatcctccggtttaccgaaccacttactttggccaccacacttgcaaaaccgaacataatctagatgccatttttattgccggacaagatcccctagatgactttaaaagtacccaaatgatccgattcggaaaagatcaggatcaggagaaggaaagccgctcgaacggtttctccttatcggttaagcatgaagaagatatcatcaaagagcaagctatagatcagtaccgtgagataaccagtaatgaccaagattgtcaagatgttatagaagaatatctatcatcaccatcaggctcttatcctccttcatcgtcatctggcagtgaaagtgctgactttaattctgatttgttatttgacaacccagactcgtgggatcgttatgatcagttttacttttgattgcactagatttttcagctaaaactatttaataatgttttcctttttatgagattgtatatatttgagaattgtgactatttaagtatttatgttattgattagataa

SEQ ID NO: 16 - protein, 289 aa, Arabidopsis thaliana
  G190 polypeptide
MEMNSPHEKAVQAIRYGHSCAMRLKRRLNHPMADGGPLSSYDLAKSIVESFSNAISILSAKPETEDDQFSDLSSRDSSPPPQGSPSKKRKIDSTNSSENWRDDSPDPIYYDGYLWRKYGQKSIKKSNHQRSYYRCSYNKDHNCEARKHEQKIKDNPPVYRTTYFGHHTCKTEHNLDAIFIAGQDPLDDFKSTQMIRFGKDQDQEKESRSNGFSLSVKHEEDIIKEQAIDQYREITSNDQDCQDVIEEYLSSPSGSYPPSSSSGSESADFNSDLLFDNPDSWDRYDQFYF

SEQ ID NO: 17 - DNA, 407 bp, Arabidopsis thaliana
  G226
ccagtagttatggataataccaaccgtcttcgtcttcgtcgcggtcccagtcttaggcaaactaagttcactcgatcccgatatgactctgaagaagtgagtagcatcgaatgggagtttatcagtatgaccgaacaagaagaagatctcatctctcgaatgtacagacttgtcggtaataggtgggatttaatagcaggaagagtcgtaggaagaaaggcaaatgagattgagagatactggattatgagaaactctgactatttttctcacaaacgacgacgtcttaataattctccctttttttctacttctcctcttaatctccaagaaaatctaaaattgtaaagaaatcaaaataaaagctttcaatcataaaagtagaacaaatcttgaatgtcttctca

SEQ ID NO: 18 - protein, 112 aa, Arabidopsis thaliana
  G226 polypeptide
MDNTNRLRLRRGPSLRQTKFTRSRYDSEEVSSIEWEFISMTEQEEDLISRMYRLVGNRWDLIAGRVVGRKANEIERYWIMRNSDYFSHKRRRLNNSPFFSTSPLNLQENLKL

SEQ ID NO: 19 - DNA, 920 bp, Arabidopsis thaliana
  G237
atggcgaagacgaaatatggagagagacataggaaagggttatggtcacctgaagaagacgagaagctaaggagcttcatcctctcttatggccattcttgctggaccactgttcccatcaaagctgggttacaaaggaatgggaagagctgcagattaagatggattaattacctaagaccagggttaaagagggatatgattagtgcagaagaagaagagactatcttgacgtttcattctcccttgggtaacaagtggtcgcaaatagctaaattcttaccgggaagaacagacaatgagataaagaactattggcactctcatttgaaaaagaaatggctcaagtctcagagcttacaagatgcaaaatctatttcccctccttcgtcttcatcatcatcacttgttgcttgtggagaaagaaatccggaaaccttgatctcgaatcacgtgttctccctccagagacttctagagaacaaatcttcatctccctcacaagaaagcaacggaaataacagccatcaatgttcttctgctcctgagattccaaggcttttcttctctgaatggctttcttcttcatatccccacaccgattattcctctgagtttaccgactctaagcacagtcaagctccaaatgtcgaagagactctctcagcttatgaagaaatgggtgatgttgatcagttccattacaacgaaatgatgatcaacaacagcaactggactcttaacgacattgtgtttggttccaaatgtaagaagcaggagcatcatatttatagagaggcttcagattgtaattcttctgctgaattcttttctccaccaacaacgacgtaaattgcgtttattgtaatgtaaatcaaatttctaaggcaaaaccggaaaaaaaaaaaaaaaaaaaaaaa

SEQ ID NO: 20 - protein, 283 aa, Arabidopsis thaliana
  G237 polypeptide
MAKTKYGERHRKGLWSPEEDEKLRSFILSYGHSCWTTVPIKAGLQRNGKSCRLRWINYLRPGLKRDMISAEEEETILTFHSPLGNKWSQIAKFLPGRTDNEIKNYWHSHLKKKWLKSQSLQDAKSISPPSSSSSSLVACGERNPETLISNHVFSLQRLLENKSSSPSQESNGNNSHQCSSAPEIPRLFFSEWLSSSYPHTDYSSEFTDSKHSQAPNVEETLSAYEEMGDVDQFHYNEMMINNSNWTLNDIVFGSKCKKQEHHIYREASDCNSSAEFFSPPTTT

SEQ ID NO: 21 - DNA, 1537 bp, Arabidopsis thaliana
  G270
gataatgcagtcactgtccacgccacacaccatctctcttcttctccccagaacctctccgtctcgtctttctccctctcttcactcccttgctttccccactcgattacggtctctttcctattcttctcaaacgtcgatcctccccgatgccggcgatgatttcattgtcggtgactgtctcgtctacgaggacggcgtcttcgaagacccttaccttgataaggaggtcactcaggttgcgaagcaggagcgcaagaagaatcggcgtggcggggctaagagattagatgaatccgagattgagcccgagaacctcgtgccagaggaatggagggatattcaggcggaggtgaatctgacgaagaaggacaagcgcaaaatagcgcaggagatggagttcggggttcgggtggagaagaagaggcaagggctaattccgctgaggaaagttgacttgaatgactttctcacgtacaaggaagccaagttggctcaattgaggcctgtcattctcgataaaccgggaaatttctccgacgacagtggagcgtcaagcgatggagagaccgctgtatcatctcccagcgagcgagtggctcctaagaaccctagatgggcagtttacggaaagggattcgaccacgttgccaagttcttcaatagcgacaagtacgatcccagcgacaagaaatccgacggccctcgaaagctgctttcaaaagaagagaagtttatgctcaatagccggaatcctgacctagccgttgccacatcaaaaaaatggcttcctcttcacacactggcagcatgtggagagttttatctggttgattccttgctaaagcacaatcttgatatcaatgcaaccgatgtgggcggcttgacagtacttcaccgagcaatcattggtaagaagcaggctattactaactacctgctgagggaatcggcaaatccatttgttcttgatgacgaaggtgcgaccttgatgcactatgctgtgcaaacagcatcagctcccacaataaaacttctcctactgtataacgctgatataaacgctcaggacagggacgggtggactccactgcacgttgcagtacaggccagaagaagcgacattgtaaagcttcttttgataaaaggggcggacatagaagtgaagaacaaggatgggttaactccgcttgggctttgcctctaccttggaagagagataaggacgtatgaggtgatgaagctgttgaaagagtttccacttagcagacacaagaagagattggtaacaacagatgaagatattgaatagtcctttcaatttcagcttgaagtacactcacttatgagaacctgagaaaaggagatggaggtaaaggtgatgattagggcattggaacctcggagtcggagtgggtccactgtctcacttccttaaatttggtttgctgttagtcttatccatcgattttggatatttatcacaacttgatccattcttaaagaaaatatctgaaaataaaaaaaaaaaaaaaaa

SEQ ID NO: 22 - protein, 435 aa, Arabidopsis thaliana
  G270 polypeptide
MQSLSTPHTISLLLPRTSPSRLSPSLHSLAFPTRLRSLSYSSQTSILPDAGDDFIVGDCLVYEDGVFEDPYLDKEVTQVAKQERKKNRRGGAKRLDESEIEPENLVPEEWRDIQAEVNLTKKDKRKIAQEMEFGVRVEKKRQGLIPLRKVDLNDFLTYKEAKLAQLRPVILDKPGNFSDDSGASSDGETAVSSPSERVAPKNPRWAVYGKGFDHVAKFFNSDKYDPSDKKSDGPRKLLSKEEKFMLNSRNPDLAVATSKKWLPLHTLAACGEFYLVDSLLKHNLDINATDVGGLTVLHRAIIGKKQAITNYLLRESANPFVLDDEGATLMHYAVQTASAPTIKLLLLYNADINAQDRDGWTPLHVAVQARRSDIVKLLLIKGADIEVKNKDGLTPLGLCLYLGREIRTYEVMKLLKEFPLSRHKKRLVTTDEDIE

SEQ ID NO: 23 - DNA, 1068 bp, Arabidopsis thaliana
  G328
atgttgaaagtagagagtaactgggcacaagcctgtgatacatgccgatcagccgcctgcaccgtgtactgccgggctgattctgcctacttgtgctccagttgtgatgctcaagttcatgctgccaatcgtcttgcttcccgccatgaacgtgttcgagtctgtcaatcatgtgagcgagccccggctgcctttttctgcaaggcagatgctgcatctctatgcacaacctgtgattcagagattcattccgcaaacccacttgctagacgccatcaacgagttccaattctgcccatttctgagtactcttacagttccacggccactaaccattcatgtgagacaacagtgacagatccagagaacagacttgtgcttggtcaagaagaagaggatgaagatgaagcagaggcggcttcatggttgttgcctaattcagggaaaaacagtggtaacaacaatggcttctcgattggggatgagtttctgaaccttgttgattatagttcgagtgataagcaattcacagatcaatccaatcagtatcaactagactgcaacgtacctcagaggagctatggggaagatggagttgttccacttcaaattgaagtatcaaagggcatgtaccaagagcaacagaactttcagctgagtatcaactgtggctcctggggagctcttcgaagctccaatggttccctcagtcatatggtgaatgtttcatctatggacctgggagttgtgccggagtcaacaacgagtgacgcaacagtatcaaacccaagatcgcccaaagcggtaacagaccaaccaccttaccctccagctcagatgctcagtccaagggacagagaagctagagtcctgagatacagagagaagaagaagatgaggaaatttgagaagacgataagatatgcttcaaggaaagcgtatgcagagaaaagaccacggatcaagggccggtttgcaaagaagaaagatgtcgatgaagaggcaaaccaagctttctccacaatgataacatttgacaccggatatggaattgttccatcattctga

SEQ ID NO: 24 - protein, 355 aa, Arabidopsis thaliana
  G328 polypeptide
MLKVESNWAQACDTCRSAACTVYCRADSAYLCSSCDAQVHAANRLASRHERVRVCQSCERAPAAFFCKADAASLCTTCDSEIHSANPLARRHQRVPILPISEYSYSSTATNHSCETTVTDPENRLVLGQEEEDEDEAEAASWLLPNSGKNSGNNNGFSIGDEFLNLVDYSSSDKQFTDQSNQYQLDCNVPQRSYGEDGVVPLQIEVSKGMYQEQQNFQLSINCGSWGALRSSNGSLSHMVNVSSMDLGVVPESTTSDATVSNPRSPKAVTDQPPYPPAQMLSPRDREARVLRYREKKKMRKFEKTIRYASRKAYAEKRPRIKGRFAKKKDVDEEANQAFSTMITFDTGYGIVPSF

SEQ ID NO: 25 - DNA, 780 bp, Arabidopsis thaliana
  G363
atgagaccaatattagacctcgaaattgaagcttcatcgggcagtagtagcagccaagtggcctcaaacttgtctccggttggggaagattacaaaccaatctcgctgaatcttagcctcagtttcaacaacaacaacaacaataatctggatcttgaatcatcgtctttgacgctgccactttcgagcacgagtgagagtagtaacccggagcagcagcagcaacaacaaccatctgtatcaaagagagtcttctcttgtaactactgccaaaggaagttctatagctctcaagcgctaggtggtcaccaaaacgctcacaaacgtgagagaacactcgccaaacgcgctatgctatgggtcttgctggggtcttccccggtagaggatcaagtagcaattatgcggctgctgccacagcagccgctctcgtgtttgccgcttcacggaagcggaaacgggaacatgacatcgttcaggactttgggaatccgggcacattcctcggcgcacgacgtcagcatgacaaggcagacaccagaaacacttattagaaacattgccaggttcaaccaggggtatttcggtaattgtatacctttttacgtggaggacgacgaggccgagatgctctggccggggagtttccggcaagctacgaatgcggttgcggttgaagcgggtaatgataatttaggtgaaagaaaaatggatttcttggacgtcaagcaagcgatggatatggaaagttctcttccagatctaaccttgaagctttga

SEQ ID NO: 26 - protein, 259 aa, Arabidopsis thaliana
  G363 polypeptide
MRPILDLEIEASSGSSSSQVASNLSPVGEDYKPISLNLSLSFNNNNNNNLDLESSSLTLPLSSTSESSNPEQQQQQQPSVSKRVFSCNYCQRKFYSSQALGGHQNAHKRERTLAKRAMLWVLLGSSPVEDQVAIMRLLPQQPLSCLPLHGSGNGNMTSFRTLGIRAHSSAHDVSMTRQTPETLIRNIARFNQGYFGNCIPFYVEDDEAEMLWPGSFRQATNAVAVEAGNDNLGERKMDFLDVKQAMDMESSLPDLTLKL

SEQ ID NO: 27 - DNA, 636 bp, Arabidopsis thaliana
  G383
atgggtttctcaatgttcttctcccccgaaaacgacgtcagccatcattcctctccatatgcttctgttgactgcactctctcacttggaactccctccactcgcctctgcaacgaggatgatgaacgtagattctcgtctcatacctccgacaccataggctgggacttcttgaacggttccaagaaaggcggtggaggcggcggacataacctcctcgctcgccgttgcgccaactgcgacaccacttctactcctctttggagaaacggtccaagaggtcccaagtcgttgtgtaatgcgtgtggaatccgattcaagaaagaagagagacgtgcatcgaccgccagaaactcgacctccggcggaggatcaactgcagctggagttccaactttggatcatcaagcaagtgcaaattattattataacaataataaccaatatgcttcatcgtcgccttggcaccatcagcataatacgcagagagttccatattactcgccggccaataacgaatactcatacgttgatgatgtcagagttgttgatcatgacgtcacaaccgacccgttcttgtcttggaggcttaacgtcgccgaccggaccggccttgtccacgattttacgatgtga

SEQ ID NO: 28 - protein, 211 aa, Arabidopsis thaliana
  G383 polypeptide
MGFSMFFSPENDVSHHSSPYASVDCTLSLGTPSTRLCNEDDERRFSSHTSDTIGWDFLNGSKKGGGGGGHNLLARRCANCDTTSTPLWRNGPRGPKSLCNACGIRFKKEERRASTARNSTSGGGSTAAGVPTLDHQASANYYYNNNNQYASSSPWHHQHNTQRVPYYSPANNEYSYVDDVRVVDHDVTTDPFLSWRLNVADRTGLVHDFTM

SEQ ID NO: 29 - DNA, 627 bp, Arabidopsis thaliana
  G435
aacaaaagaaaaaacaaaaaagaagagaaaaatggagaattctcagagtcagggtaaaaacaagaagaagaggctaacacaagatcaagttagacaactggagaagtgcttcactatgaacaagaagcttgagccagatctgaaacttcaactgtcgaaccagcttggtctacctcaaagacaagtcgctgtctggttccaaaacaagcgagccaggttcaagactcagtctcttgaggtccaacactgcactcttcagtccaagcacgaagcagctctctccgacaaggcaaagttagagcatcaagtgcagtttctccaagatgagctgaagagagcaaggaatcagcttgctctgttcacaaatcaagattctcctgttgataattctaatcttggttcttgtgatgaagatcatgatgatcaagtggtggtattcgacgagctttacgcttgctttgttagcaatggacatggatcttcatcaacctcatgggtctgattctgtttcgacgcagacaagattccaatatatatagtcttgtctctgttttgtttcgtttgatctgtttctctttgtctgaatagatttaaaatttgtaattaaagtcattcagacattcacta

SEQ ID NO: 30 - protein, 156 aa, Arabidopsis thaliana
  G435 polypeptide
MENSQSQGKNKKKRLTQDQVRQLEKCFTMNKKLEPDLKLQLSNQLGLPQRQVAVWFQNKRARFKTQSLEVQHCTLQSKHEAALSDKAKLEHQVQFLQDELKRARNQLALFTNQDSPVDNSNLGSCDEDHDDQVVVFDELYACFVSNGHGSSSTSWV

SEQ ID NO: 31 - DNA, 988 bp, Arabidopsis thaliana
  G450
gagttatcgagagagagagaaaacatattctgatttaagacatatatagacagcaagaagagatatgaaccttaaggagacggagctttgtcttggcctccccggaggcactgaaaccgttgaaagtccggccaagtcgggtgttgggaacaagagaggcttctccgagaccgttgatctcaaacttaatcttcaatctaacaaacaaggacatgtggatctcaacactaatggagctcccaaggagaagaccttccttaaagacccttctaagcctcctgctaaagcacaagtggtgggttggccaccggtgaggaactaccggaaaaatgttatggctaatcagaagagcggcgaagcagaggaggcaatgagtagtggtggaggaaccgtcgcctttgtgaaggtttccatggatggagctccttatcttcggaaggttgacctcaagatgtacaccagctacaaggatctctctgatgccttggccaaaatgttcagctcctttaccatggggagttatggagcacaagggatgatagatttcatgaacgagagtaaagtgatggatctgttgaacagttctgagtatgttccaagctacgaggacaaagatggtgactggatgctcgttggtgatgtcccctggccgatgtttgtcgagtcatgcaaacgtttgcgcataatgaaaggatccgaagcaattggacttgctccaagagcaatggagaagttcaagaacagatcatgaacaaaaaaaaaagaggacaatatgcattgatttttttttttttggtattgttatgatcatgtgttttaatttaaaatataggaaggatataggaaaatataattgtttacaaaaaaataactttaaatatgtcttttttttttttttgaaattagtctgtgtttttgttttcatctcttaattagtagaaatcattttttaatatgtaattgtgatagtaaatctatagagttcgta

SEQ ID NO: 32 - protein, 228 aa, Arabidopsis thaliana
  G450 polypeptide
MNLKETELCLGLPGGTETVESPAKSGVGNKRGFSETVDLKLNLQSNKQGHVDLNTNGAPKEKTFLKDPSKPPAKAQVVGWPPVRNYRKNVMANQKSGEAEEAMSSGGGTVAFVKVSMDGAPYLRKVDLKMYTSYKDLSDALAKMFSSFTMGSYGAQGMIDFMNESKVMDLLNSSEYVPSYEDKDGDWMLVGDVPWPMFVESCKRLRIMKGSEAIGLAPRAMEKFKNRS

SEQ ID NO: 33 - DNA, 1250 bp, Arabidopsis thaliana
  G522
cgtcgacgtgtcctatacacatatctataattccacaggttgaagaaaagaaataatggaatcggtggatcaatcatgtagtgttcctccgggattcagattccatccaacagatgaagagctcgttggttactatttaaggaaaaaagttgcatcgcaaaagatcgatcttgatgtcataagagatattgatctctacagaatcgaaccatgggatttacaagagagctgccgaatcggatatgaggaaagaaatgaatggtatttcttcagccacaaagataagaaatatccaacaggaacaagaacaaacagagcgaccatggctgggttttggaaagccacgggccgagacaaggctgtttacgacaagtcaaaactgattggtatgagaaaaacacttgtgttctacaaaggaagagcccctaatggccaaaaaaccgattggatcatgcatgaataccggctagagtcagatgagaatgcacctcctcaggaagaagggtgggtggtttgtagagcgttcaagaaaaagccaatgaccgggcaagccaagaacacagaaacttggagctcaagttacttttacgacgaattaccgagtggagtacgctcagttacggagcctcttaactacgtatctaagcagaaacaaaacgtttttgcacaagatttaatgttcaagcaagaactagaaggatcagatatcggtttaaacttcatccactgcgatcaattcattcaacttccgcagcttgaaagcccttcactccctcttaccaaaagaccagtgagcttgacgtcaattacatcattggagaagaataaaaatatctacaaaagacatttaatagaagaggatgtgagcttcaatgcgctaataagtagtggaaataaagataagaagaagaagaaaacatcagtgatgacgacggattggagagcactcgataaatttgttgcttctcaacttatgagccaagaagatggagtttcgggttttggaggtcatcatgaagaagataacaataaaatcggtcattacaataacgaagagagcaataacaagggatcagtagagactgcttcttccacgttattgagtgatagagaagaagagaacagattcatcagtggattattgtgttccaacttggactatgacttatatagggatttacatgtttgataaaagataacactataatatggtgcgtaacgtttgctatataggtaccgtagaatttagc

SEQ ID NO: 34 - protein, 377 aa, Arabidopsis thaliana
  G522 polypeptide
MESVDQSCSVPPGFRFHPTDEELVGYYLRKKVASQKIDLDVIRDIDLYRIEPWDLQESCRIGYEERNEWYFFSHKDKKYPTGTRTNRATMAGFWKATGRDKAVYDKSKLIGMRKTLVFYKGRAPNGQKTDWIMHEYRLESDENAPPQEEGWVVCRAFKKKPMTGQAKNTETWSSSYFYDELPSGVRSVTEPLNYVSKQKQNVFAQDLMFKQELEGSDIGLNFIHCDQFIQLPQLESPSLPLTKRPVSLTSITSLEKNKNIYKRHLIEEDVSFNALISSGNKDKKKKKTSVMTTDWRALDKFVASQLMSQEDGVSGFGGHHEEDNNKIGHYNNEESNNKGSVETASSTLLSDREEENRFISGLLCSNLDYDLYRDLHV

SEQ ID NO: 35 - DNA, 708 bp, Arabidopsis thaliana
  G551
atggagtggtcaacaacgagcaacgtagaaaacgtgagagtagctttcatgccaccgccatggccggagtctagttcctttaactcgctccacagcttcaactttgatccttacgcaggaaattcatatacgcctggcgatacacaaaccggaccggttatctctgtaccggaatcagaaaagatcatgaatgcgtaccgatttccgaacaacaacaatgagatgataaaaaagaagagactaacgagtggacaattagcttcacttgagcgaagttttcaagaagagatcaaattagattcagacaggaaggtgaagctgtcgagagagctcggtctgcagccacgtcagatagcagtttggttccaaaaccgccgtgcacggtggaaggcgaagcagcttgagcagttgtacgactcgcttagacaagagtacgacgtcgtttctagggagaaacaaatgttacacgatgaggtgaagaagctgagagctttactaagagaccagggtttgatcaagaagcaaatctctgccgggaccatcaaagtttccggtgaggaagacacggtggagatttcatcggtggtggtagctcatccaagaacggagaatatgaacgcaaatcaaatcaccggagggaatcaagtttacggtcaatacaacaatccgatgctggttgcttcctctggctggccgtcatacccctga

SEQ ID NO: 36 - protein, 235 aa, Arabidopsis thaliana
  G551 polypeptide
MEWSTTSNVENVRVAFMPPPWPESSSFNSLHSFNFDPYAGNSYTPGDTQTGPVISVPESEKIMNAYRFPNNNNEMIKKKRLTSGQLASLERSFQEEIKLDSDRKVKLSRELGLQPRQIAVWFQNRRARWKAKQLEQLYDSLRQEYDVVSREKQMLHDEVKKLRALLRDQGLIKKQISAGTIKVSGEEDTVEISSVVVAHPRTENMNANQITGGNQVYGQYNNPMLVASSGWPSYP

SEQ ID NO: 37 - DNA, 1638 bp, Arabidopsis thaliana
  G558
ggaatttcggatcgtgtctctctctgtttctttgtttcaatccgatttcgaatcaagccctttacttgtgcaccttcaagatttcgttttttccagcgcccagaatgctccgggtgaccaacatttgttcctgattcatttcctattggttcgtattgtctgtgcacacaagagaaatttcaagaagttgttactaaaagagaggccacaagtggatattgtctttgttatcaagtgttagtacagaaaagtggtgagaaagtaatatggctgataccagtccgagaactgatgtctcaacagatgacgacacagatcatcctgatcttgggtcggagggagcactagtgaatactgctgcttctgattcgagtgaccgatcgaagggaaagatggatcaaaagactcttcgtaggcttgctcaaaaccgtgaggcagcaaggaaaagcagattgaggaagaaggcttatgttcagcagctagagaacagccgcttgaaactaacccagcttgagcaggagctgcaaagagcaagacagcagggcgtcttcatttcaggcacaggagaccaggcccattctactggtggaaatggtgctttggcgtttgatgctgaacattcacggtggttggaagaaaagaacaagcaaatgaacgagctgaggtctgctctgaatgcgcatgcaggtgattctgagcttcgaataatagtcgatggtgtgatggctcactatgaggagcttttcaggataaagagcaatgcagctaagaatgatgtctttcacttgctatctggcatgtggaaaacaccagctgagagatgtttcttgtggctcggtggatttcgttcatccgaacttctaaagcttctggcgaatcagttggagccaatgacagagagacagttgatgggcataaataacctgcaacagacatcgcagcaggctgaagatgctttgtctcaagggatggagagcttacaacagtcactagctgatactttatcgagcgggactcttggttcaagttcatcagggaatgtcgcaagctacatgggtcagatggccatggcaatgggaaagttaggtacactcgaaggatttatccgccaggctgataatttgagactacaaacattgcaacagatgataagagtattaacaacgagacagtcagcacgtgctctacttgcaatacacgattacttctcacggctacgagctctaagctccttatggcttgctcgacccagagagtgaaactgtattttggtcacatgtcagctgtacaaaatccatatggacacaaaaccaggagagactattaatcaacacttgtcagattcttcttaccaaatccatcaacaaataagcaaatttctgggaaacaaaagactctttgtatgtaggtttcttctacatggttgtggtaattcatgttgttttagttgtagtcatcagtttttaatttagcatttgaaaagttcaatgttgtttatatagcatcttcgattatcttagaaaggttattgaattttgtttttttttgttacttttgtgtgtggtaaaggtgttttaaccttgcaacttctgtactgtaatcatttaacaatattaagatgttctatttgagttttgt

SEQ ID NO: 38 - protein, 330 aa, Arabidopsis thaliana
  G558 polypeptide
MADTSPRTDVSTDDDTDHPDLGSEGALVNTAASDSSDRSKGKMDQKTLRRLAQNREAARKSRLRKKAYVQQLENSRLKLTQLEQELQRARQQGVFISGTGDQAHSTGGNGALAFDAEHSRWLEEKNKQMNELRSALNAHAGDSELRIIVDGVMAHYEELFRIKSNAAKNDVFHLLSGMWKTPAERCFLWLGGFRSSELLKLLANQLEPMTERQLMGINNLQQTSQQAEDALSQGMESLQQSLADTLSSGTLGSSSSGNVASYMGQMAMAMGKLGTLEGFIRQADNLRLQTLQQMIRVLTTRQSARALLAIHDYFSRLRALSSLWLARPRE

SEQ ID NO: 39 - DNA, 1479 bp, Arabidopsis thaliana
  G567
aaaaagaagaatcagaaagtgaaaaagagagcgagcgatgaacagtatcttctccattgacgatttctccgatcctttctgggaaactcctccgattcctctcaatcccgactcttctaagcctgttacggcggatgaagttagccagagtcaaccggaatggactttcgagatgtttctcgaagagatttcttcgtcggcggtgagctctgagccacttggtaacaacaacaacgcgatcgtcggtgtttcttcggcgcaatctcttccttctgtttccggacagaatgatttcgaggatgatagtcgatttcgtgatcgcgattcgggaaatttggattgtgctgctcccatgacgacgaagacggtgaatgttgattccgatgattatcgtcgtgttcttaagaacaagcttgaggctgagtgcgcgactggtgtttctcttcgggttgggtctgtgaagcctgaagattcgactagttctccagaaactcaacttcaaccagttcaatccagtcctcttactcaaggagaacttggtgttacttcttccttaccagctgaggtgaaaaaaactggtgtatcaatgaagcaggttactagtggatcgtcgagagaatattctgatgacgaggaccttgatgaagagaatgaaaccaccggttccttgaagccagaggacgttaaaaaatctagaaggatgctgtcaaatcgtgagtcagctaggcgatctagaaggagaaagcaggagcaaacaagtgacctcgaaacacaggttaatgatctaaaaggtgagcattcatcacttcttaaacaactgagcaacatgaatcacaagtatgacgaggctgctgttggcaatagaatactaaaggctgacattgagacattaagagctaaggtgaaaatggcggaagaaaccgtgaagagagtaacaggaatgaatccgatgcttctcggaagatcaagtggacataacaacaacaacagaatgccaataactggtaacaacaggatggattcttctagcattattccagcttatcaaccacactcaaacctaaaccatatgtcaaaccaaaacatcgggatcccaaccattctacctccaagactcggaaacaatttcgctgctcctccatcccaaaccagctctcccttgcagagaattagaaatgggcaaaatcaccatgttactccaagcgccaacccgtatggctggaataccgaacctcagaacgattcagcatggccgaaaaaatgcgtggactgatcaaacaagaagcgggtttcgcactatattaatgtctatgcatctgtaatttgtaagtgttattaagttacgaatcatgagaaaacatcttgtgaaaatacagtctcatggcttatatatatatataagctctgtcttataacattacaagattcttatttgagaatcgtctttctatttatagctaataaaaaaaaaaaaaaaaa

SEQ ID NO: 40 - protein, 411 aa, Arabidopsis thaliana
  G567 polypeptide
MNSIFSIDDFSDPFWETPPIPLNPDSSKPVTADEVSQSQPEWTFEMFLEEISSSAVSSEPLGNNNNAIVGVSSAQSLPSVSGQNDFEDDSRFRDRDSGNLDCAAPMTTKTVNVDSDDYRRVLKNKLEAECATGVSLRVGSVKPEDSTSSPETQLQPVQSSPLTQGELGVTSSLPAEVKKTGVSMKQVTSGSSREYSDDEDLDEENETTGSLKPEDVKKSRRMLSNRESARRSRRRKQEQTSDLETQVNDLKGEHSSLLKQLSNMNHKYDEAAVGNRILKADIETLRAKVKMAEETVKRVTGMNPMLLGRSSGHNNNNRMPITGNNRMDSSSIIPAYQPHSNLNHMSNQNIGIPTILPPRLGNNFAAPPSQTSSPLQRIRNGQNHHVTPSANPYGWNTEPQNDSAWPKKCVD

SEQ ID NO: 41 - DNA, 1054 bp, Arabidopsis thaliana
  G580
ccaaaaaacaaagcattctatgctattctgttctgttctccaatgttgtcatcagcaaagcataataagatcaacaaccatagtgccttttcaatttcctcttcatcatcatcattatcaacatcatcctccctaggccataacaaatctcaagtcaccatggaagaagtatggaaagaaatcaaccttggttcacttcactaccatcggcaactaaacattggtcatgaaccaatgttaaagaaccaaaaccctaataactccatctttcaagatttcctcaacatgcctctgaatcaaccaccaccaccaccaccaccaccttcctcttccaccattgtcactgctctctatggctctctgcctcttccgcctcctgccactgtcctcagcttaaactccggtgttggattcgagtttcttgataccacagaaaatcttcttgcttctaaccctcgctcctttgaggaatctgcaaagtttggttgtcttggtaagaaaagaggccaagattctgatgatactagaggagacagaaggtataagcgtatgatcaagaacagagaatctgctgctcgttcaagggctaggaagcaggcatatacaaacgaacttgagcttgaaattgctcacttgcagacagagaatgcaagactcaagatacaacaagagcagctgaaaatagccgaagcaactcaaaaccaagtaaagaaaacactacaacggtcttccacagctccattttgagaaaaatctactatttctttttgggggagtttcaagtgtttcttatgaagatgagaaaaacagaaaaagtttgtacattttagctaagttaaatttgtggtggtaagtaatgtaaaagaaaagtgtgtgtagaagaaaagtgtctagaaaaagaaagcaactaactttcttcttcttctctggtttcctatcaactcttttgacttttgtactttttttcttctctacttaacctctattattgtaatgccaagtcaagtccttatctagctagtacatgagtttctgttttcactggttaagccat

SEQ ID NO: 42 - protein, 234 aa, Arabidopsis thaliana
  G580 polypeptide
MLSSAKHNKINNHSAFSISSSSSSLSTSSSLGHNKSQVTMEEVWKEINLGSLHYHRQLNIGHEPMLKNQNPNNSIFQDFLNMPLNQPPPPPPPPSSSTIVTALYGSLPLPPPATVLSLNSGVGFEFLDTTENLLASNPRSFEESAKFGCLGKKRGQDSDDTRGDRRYKRMIKNRESAARSRARKQAYTNELELEIAHLQTENARLKIQQEQLKIAEATQNQVKKTLQRSSTAPF

SEQ ID NO: 43 - DNA, 993 bp, Arabidopsis thaliana
  G635
atggagatcatgcgtccaggggtctcagaaaacactttgaaaggaaaaataagaatcacaacgcggtgcatgtggcttgacaaaggaagacttttagatgcacttcacaaagcagctcatgctgctctatcaagttgtcctgtgacatgtcccttgtctcacatggaaagaacagtctccgaagtcctgaggaagattgtaaggaagtacagtggtaaaaggcctgaagtcatcgctatagccactgagaatccaatggctgtccgagctgatgaggtcagtgcgagactgtctggtgatccaagtgttggttctggagttgcagctttaaggaaagttgttgaaggaaatgacaaaagaagtcgggcgaagaaagcaccttcacaagaagcttcccccaaagaagtagatcgcactttggaagatgatatcattgatagtgcaagactactggctgaagaagaaactgcggcatcaacatacacggaagaagttgatacgcccgttgggagttcttcagaagagtcagacgatttttggaaatcattcatcaatccatcatcgtcaccttcaccgagtgaaacagaaaatatgaataaggtagctgatacggagcctaaagcagagggtaaggaaaacagcagagacgacgatgaattagctgatgcttcagattctgaaaccaagtcatcaccaaaacgtgtgaggaagaacaaatggaaaccggaggagataaagaaggtaatcagaatgcgaggagagctgcacagtagatttcaagtggtgaaaggtagaatggcattgtgggaagagatctcttcaaatctatcagctgaaggaatcaatcgaagcccgggacaatgcaaatctctctgggcatcacttattcagaaatacgaggagagcaaggctgatgagagaagcaagacgagttggccacattttgaggatatgaacaacattttgtcagagctaggcacacctgcgtcttaa

SEQ ID NO: 44 - protein, 330 aa, Arabidopsis thaliana
  G635 polypeptide
MEIMRPGVSENTLKGKIRITTRCMWLDKGRLLDALHKAAHAALSSCPVTCPLSHMERTVSEVLRKIVRKYSGKRPEVIAIATENPMAVRADEVSARLSGDPSVGSGVAALRKVVEGNDKRSRAKKAPSQEASPKEVDRTLEDDIIDSARLLAEEETAASTYTEEVDTPVGSSSEESDDFWKSFINPSSSPSPSETENMNKVADTEPKAEGKENSRDDDELADASDSETKSSPKRVRKNKWKPEEIKKVIRMRGELHSRFQVVKGRMALWEEISSNLSAEGINRSPGQCKSLWASLIQKYEESKADERSKTSWPHFEDMNNILSELGTPAS

SEQ ID NO: 45 - DNA, 1292 bp, Arabidopsis thaliana
  G675
taatcagagagagatggggaggtcgccttgttgcgacgagaatggtctaaagaaagggccatggactcctgaagaagatcaaaagcttattgattacattcataaacatggtcatggaagctggagagctctccccaagctcgcagatttgaataggtgtggaaagagttgtagactgaggtggacaaattatttgagaccagacatcaaaagaggaaagttttcagccgaagaagagcaaacaatcctccatctccactccattctcgggaataaatggtcagctattgcgacgcatttgcaaggtcgtacagataatgagataaaaaacttttggaacacacatctaaagaagaaattgatccagatggggatcgatcctgtgactcatcagccaagaaccgacctcttcgcaagtttacctcagctcatagccttggcaaatctaaaagacctaatcgaacaaacatcacaattctcatccatgcaaggcgaagcagcccaactagccaatctacaatatctccaacgtatgtttaattcttcggcttcattaaccaacaacaacggcaacaattttagcccgagtagtattctcgatatcgatcagcaccatgccatgaacctcttaaactccatggtctcttggaacaaagatcaaaaccccgcttttgatccggttcttgaactcgaggctaacgatcaaaatcaagatttatttccactagggtttatcattgatcaacccacccaaccactccaacaacaaaaataccatttaaacaatagtcctagtgagctaccatcgcaaggtgacccacttcttgatcatgtccctttcagtctccaaacacctttgaatagtgaggatcactttatagataatttggtcaaacatccaactgatcatgagcatgaacatgatgacaatccatcttcatgggttctcccttctcttatagacaataaccctaaaactgtcacgtcttctcttccacacaacaatccggcggatgcaagtagcagctcaagctatggaggttgtgaagctgcgtcgttttattggcctgacatttgcttcgacgaaagcctcatgaacgttatatcttagttactcttggtttagtgttttttttttagatctctgttattttatacaagttttttatttggtgttggtgttttgtaagtagaaaaggtgcgaatgtgtgatccgtttatccctttatgtaattaaacaggagatctctgtgatccgttagtcttttgtttaaaaaaaaaaaaaaaaaaaa

SEQ ID NO: 46 - protein, 365 aa, Arabidopsis thaliana
  G675 polypeptide
MGRSPCCDENGLKKGPWTPEEDQKLIDYIHKHGHGSWRALPKLADLNRCGKSCRLRWTNYLRPDIKRGKFSAEEEQTILHLHSILGNKWSAIATHLQGRTDNEIKNFWNTHLKKKLIQMGIDPVTHQPRTDLFASLPQLIALANLKDLIEQTSQFSSMQGEAAQLANLQYLQRMFNSSASLTNNNGNNFSPSSILDIDQHHAMNLLNSMVSWNKDQNPAFDPVLELEANDQNQDLFPLGFIIDQPTQPLQQQKYHLNNSPSELPSQGDPLLDHVPFSLQTPLNSEDHFIDNLVKHPTDHEHEHDDNPSSWVLPSLIDNNPKTVTSSLPHNNPADASSSSSYGGCEAASFYWPDICFDESLMNVIS

SEQ ID NO: 47 - DNA, 1760 bp, Arabidopsis thaliana
  G729
aaaaaaaacaaaagaatagtcatcatcatcatcaccatcatcatccttatcatcatcaacaacttcagtggcagcaatagcaagagaaaggtttctttaattatgtctatggaaggtgtttttctagagaaaaccaaaacaaacacaacaactactctccctgatctatctctccacatcagtctcccagatattcatcaataccatcacaatgaatcttctaaagaatcttcaagaagatcctcccaactcgaaaacaacaaccgatcgtccaactttgaactctctttatctcatcataaccatccaacagcaagaatcttccattgtcctgatcgaagaacccttaatcttcctcatcagcagcattacaacaaccctatcatcaatggtgttcatcaaagggtcgatgaatccgagattagtaatctccaccgtccaattagaggcatcccggtctatcacaaccgttcattccctttccaccaacaaaactcttcattaccttctcttggaggaggagacatggatcaaatctcaatcttaaactcatcttccggctacaacaacgcttaccgatcattacaatcttccccgaggcttaaaggtgttcctttgcatcatcatcatcatcataatcagtatggagtcgttggatcttcagattcgtcttctcctcatcaccataaccatcatcatcatgggatgatcagatcaagattcttgcctaagatgccgacaaagcgaagcatgagagctccaaggatgcgttggactagtagcctccacgcgcggtttgttcacgctgttgagcttctaggcggccatgaaagagcaactccaaagtcggttcttgagctcatggatgtaaaagacttaactttagcacatgtgaagagccatttgcagatgtatcgaactgttaagaccactaacaagcctgctgcttcatcagatgggtcaggagaagaagaaatgggcataaatggaaacgaagttcatcatcaatcatcgacggatcaaagggcacaatctgatgatacttctcttcatcaagaaactgacatttcttccacacaacctcgttggagtaactcttcacgagagacatggccattaagtaataactgctcaagcgacatagatacaatgatcagaacttcatcaacatcaatgatctctcattatcaaagatccagcattcaaaatcaggagcaaaggtcgaatgatcaagcaaagaggtgtggaaatcttagttgtgaaaatccaagtttggagtttacattaggcagaccagattggcacgagaaatgactttcttgatcaatttggatttttatatatattggattttttatttttttgtttcatctttctctctctatatatactcagaaacatgtatgcagtatatatctttgtgacgatgaaattctcagcgtaaaagaaggagaacacgtagagagccaagctgctcaagagtgttgatttttgcacagagagagagaatatcactaccaaaatgaagaaatttggaggttcctcttctcaagttccattgatgatttgattataaagtggatgatcaatgtatgagtttttgtttttgggttttcgggtttttagttttttgaggttgatctggtggtgtgatcataagttatataattggaagatcatcaaaatgtggtgaaagtttggatatttttttgaaagcctcttggttggctagagggtttcaagttttttttttttttttt

SEQ ID NO: 48 - protein, 403 aa, Arabidopsis thaliana
  G729 polypeptide
MSMEGVFLEKTKTNTTTTLPDLSLHISLPDIHQYHHNESSKESSRRSSQLENNNRSSNFELSLSHHNHPTARIFHCPDRRTLNLPHQQHYNNPIINGVHQRVDESEISNLHRPIRGIPVYHNRSFPFHQQNSSLPSLGGGDMDQISILNSSSGYNNAYRSLQSSPRLKGVPLHHHHHHNQYGVVGSSDSSSPHHHNHHHHGMIRSRFLPKMPTKRSMRAPRMRWTSSLHARFVHAVELLGGHERATPKSVLELMDVKDLTLAHVKSHLQMYRTVKTTNKPAASSDGSGEEEMGINGNEVHHQSSTDQRAQSDDTSLHQETDISSTQPRWSNSSRETWPLSNNCSSDIDTMIRTSSTSMISHYQRSSIQNQEQRSNDQAKRCGNLSCENPSLEFTLGRPDWHEK

SEQ ID NO: 49 - DNA, 952 bp, Arabidopsis thaliana
  G812
tcgaaatcatcaagaatcttgtctttaatttccaattgggtttttcaaaacccgttacctcaggatgatgaacccgtttctcccggaaggctgcgatccaccaccaccaccacaaccaatggagggtttacacgaaaatgctccacctccatttctgaccaagacatttgagatggtggatgatccaaacactgaccacatcgtatcttggaacagaggaggaacaagttttgtcgtctgggatttgcattctttctccacgattctccttcctcgtcatttcaaacacagcaatttctcaagtttcatcagacaactcaatacttatggtttcagaaagatagaagcagagagatgggaatttgcaaacgaagagtttttgttaggacaaagacagttgttgaagaacatcaagaggagaaacccttttactccatcatcttcaccaagccatgacgcttgcaacgagcttcgcagagagaagcaagtgctaatgatggagatagtgagtctaagacagcagcaacaaacaacgaaaagctacatcaaagctatggaacagaggatagaaggaacagagaggaaacagagacaaatgatgtcgtttctggctagagcaatgcagagtccttcgtttttgcatcagttgttgaaacaaagagataaaaaaattaaggagcttgaggataatgagtcagcaaagaggaaaagaggttcttcttcgatgtcggaattggaagttttggctttggagatgcaagggcatggaaaacagaggaatatgttggaagaagaggatcatcaactggtggtagagagagagttggatgatggtttctgggaagagttgcttagtgatgagagtttggcttccacctcctaactagatggatttctttttggttttgtttttagtttcttctactttcaagctcattttcttctgtcacaa

SEQ ID NO: 50 - protein, 272 aa, Arabidopsis thaliana
  G812 polypeptide
MMNPFLPEGCDPPPPPQPMEGLHENAPPPFLTKTFEMVDDPNTDHIVSWNRGGTSFVVWDLHSFSTILLPRHFKHSNFSSFIRQLNTYGFRKIEAERWEFANEEFLLGQRQLLKNIKRRNPFTPSSSPSHDACNELRREKQVLMMEIVSLRQQQQTTKSYIKAMEQRIEGTERKQRQMMSFLARAMQSPSFLHQLLKQRDKKIKELEDNESAKRKRGSSSMSELEVLALEMQGHGKQRNMLEEEDHQLVVERELDDGFWEELLSDESLASTS

SEQ ID NO: 51 - DNA, 1946 bp, Arabidopsis thaliana
  G843
gccgggaagaagtgcgagcttggtgccgatgggtcgttcgaaactagcttctcgtcctgctgaggaagacctgaatccaggaaaatcaaaaaggaaaaagatatcattgggtcctgagaatgctgcggcatcaatttccaccggaattgaagctgggaatgagaggaaacctggcctttactgttgtaactattgcgataaagatctgtctggtttggttcgtttcaaatgtgctgtttgtatggactttgatctttgtgtggaatgcttttctgtcggcgttgaacttaatcgtcacaagaacagtcacccatatcgtgttatggacaatttgtctttttcgcttgttacttctgattggaatgccgatgaagagatactccttcttgaggccattgcgacatacgggtttggcaattggaaagaagttgcagaccatgttggtagtaagacaacgacagaatgtattaaacacttcaattctgcttacatgcagtcaccatgctttccacttccggacttgtcccatactattggaaagagcaaagatgagctgcttgctatgagtaaagatagtgcagtcaaaacagaaatacctgcatttgtgaggctatctccaaaagaagagttacctgtgtcagctgaaatcaaacacgaagcttcagggaaggtcaatgaaatagatccacctttgtctgccttagctggagtcaagaagaaaggcaatgtaccgcaggctaaggacatcatcaagttggaagctgcaaaacaacaatctgacaggagtgtcggggagaagaaactcagacttcctggagagaaagttccattagtaacagagttatatggttacaatctaaagagggaagaatttgagatcgaacatgacaacgatgctgagcaactgcttgctgacatggaatttaaggattctgacacagatgctgagcgtgagcagaaactgcaggttcttcgtatttactcgaaaaggcttgatgagaggaagcggaggaaggaatttgttctggaaagaaacttgttgtaccctgatcaatatgagatgagcctttcagcagaggagagaaaaatatataaaagctgtaaagtgtttgcgcggttccaatccaaagaagagcacaaggaactgattaagaaagtcattgaagagcaccaaattctcagaagaatcgaggatcttcaggaagctagaactgctggttgcaggacaacttcagacgcaaatagatttatagaagagaagagaaagaaggaagctgaagaaagtatgctgctgcggcttaaccacggtgcaccaggcagtatagccggtaaaacactaaaaagtccaagagggttacccagaaatttgcatccctttggttctgactcactgccaaaggtcacacctccaagaatatacagcggtttggacacttgggatgttgatggtctccttggagctgacttactctcagagaccgaaaagaagatgtgcaatgagaccagaatactgcctgtacactatttgaagatgttggatatcttaacaagagaaataaagaaggggcagataaagaaaaagtctgatgcttatagcttcttcaaagtagagccgagtaaagtagacagagtatatgatatgctggttcataagggaataggtgactcaacatgactcatagcttcatggtcctaacatgtacttctcgaacatatattagccatgtaaatataaaggaaggtgatgctgattttggttacacatcttgttctctgttagtttcgacaacttgacaatgtctgattgttatgaccttcaaaggctgtttcagattttttgatacaacgtttaaactgaatattgtaatgccttcactcatctgattccttcaatttttgttatatgagatcagaaagtcttgagacaaaaaaaaaaaaaaaaaaaa

SEQ ID NO: 52 - protein, 548 aa, Arabidopsis thaliana
  G843 polypeptide
MGRSKLASRPAEEDLNPGKSKRKKISLGPENAAASISTGIEAGNERKPGLYCCNYCDKDLSGLVRFKCAVCMDFDLCVECFSVGVELNRHKNSHPYRVMDNLSFSLVTSDWNADEEILLLEAIATYGFGNWKEVADHVGSKTTTECIKHFNSAYMQSPCFPLPDLSHTIGKSKDELLAMSKDSAVKTEIPAFVRLSPKEELPVSAEIKHEASGKVNEIDPPLSALAGVKKKGNVPQAKDIIKLEAAKQQSDRSVGEKKLRLPGEKVPLVTELYGYNLKREEFEIEHDNDAEQLLADMEFKDSDTDAEREQKLQVLRIYSKRLDERKRRKEFVLERNLLYPDQYEMSLSAEERKIYKSCKVFARFQSKEEHKELIKKVIEEHQILRRIEDLQEARTAGCRTTSDANRFIEEKRKKEAEESMLLRLNHGAPGSIAGKTLKSPRGLPRNLHPFGSDSLPKVTPPRIYSGLDTWDVDGLLGADLLSETEKKMCNETRILPVHYLKMLDILTREIKKGQIKKKSDAYSFFKVEPSKVDRVYDMLVHKGIGDST

SEQ ID NO: 53 - DNA, 1152 bp, Arabidopsis thaliana
  G881
gtgaccgaagaaagcaaattgagactacgcaccaactagtcctttggtttgtatcttaagataaaggtttcttttatggacggttcttcgtttctcgacatctctctcgatctcaacaccaatcctttctccgcaaaacttccgaagaaggaggtctcagttttggcttctactcacttaaagaggaaatggttggagcaagacgagagcgcaagtgagttacgagaggagctaaacagagttaattcagagaacaagaagctaacagagatgttagctagagtctgtgagagctacaacgaactacataatcatttggagaagcttcagagtcgccagagccctgaaatcgagcagaccgatataccgataaagaaaagaaaacaagacccggatgagttcttaggctttcctattggactcagtagtggaaaaactgagaacagctccagcaacgaagatcatcatcatcatcatcagcaacatgagcagaaaaatcagcttctttcatgtaaaagaccagtcactgatagcttcaacaaagcaaaagtttcgactgtctacgtgcctactgaaacatcggacacaagcttgacagttaaagatggatttcaatggaggaaatacggacaaaaggttacaagagacaacccgtcacctagagcttactttagatgctcgtttgcaccgtcttgtccagtaaaaaagaaggtacaacgcagcgcagaggatccatctttacttgtagcgacatacgaagggacgcataaccacttgggtccaaatgcttctgaaggggatgctacaagccagggtgggtcaagcacagtgactttggatctggttaatggctgtcatagactagcgttggagaaaaacgaaagggataatacgatgcaagaggttctgattcaacaaatggcgtcatcgttaacaaaagattcgaaatttacagctgctcttgctgctgctatatctgggaggttaatggagcaatctagaacatgaacgtttttagtgaatgtattgtttttgtttgtttagaatgattcttcgttttcgaattgtgtctttcgattaggagataaaagatgtatataaatattataagtagatgaagaaatcgtataagtaaaaaaaaaaaaaaaaaaa

SEQ ID NO: 54 - protein, 310 aa, Arabidopsis thaliana
  G881 polypeptide
MDGSSFLDISLDLNTNPFSAKLPKKEVSVLASTHLKRKWLEQDESASELREELNRVNSENKKLTEMLARVCESYNELHNHLEKLQSRQSPEIEQTDIPIKKRKQDPDEFLGFPIGLSSGKTENSSSNEDHHHHHQQHEQKNQLLSCKRPVTDSFNKAKVSTVYVPTETSDTSLTVKDGFQWRKYGQKVTRDNPSPRAYFRCSFAPSCPVKKKVQRSAEDPSLLVATYEGTHNHLGPNASEGDATSQGGSSTVTLDLVNGCHRLALEKNERDNTMQEVLIQQMASSLTKDSKFTAALAAAISGRLMEQSRT

SEQ ID NO: 55 - DNA, 1199 bp, Arabidopsis thaliana
  G937
tggaaaaagtttgagtttttaattcgaatcgagaaaaaataaaaatgggttctttaggtgatgagcttagtttgggatcgatctttgggagaggagtttcgatgaatgttgtggcggttgagaaagttgatgaacatgttaagaagcttgaagaagagaagagaaagctcgaaagttgtcaacttgagcttcctctgtctttgcagattttaaacgatgcgattttgtatctgaaggataagagatgttcagagatggagactcaaccattgttgaaagatttcatttctgttaataaacctattcaaggagaaagaggaatagaattgctgaaaagagaggagctaatgagggagaagaagtttcagcaatggaaagctaatgatgatcacactagtaagatcaagagcaagcttgagattaagagaaatgaggagaaatctcctatgttgttgattccaaaggtggaaactggtttaggcctcggtttaagttcgagttcgataagaagaaaagggattgttgcctcatgtggctttacttctaactctatgccacaaccaccaacaccagcagtaccacaacaaccagcatttcttaagcagcaagctttacggaagcaaagaaggtgttggaatccagagttgcatcgccgatttgtcgatgcattgcaacagctaggtggaccgggagtggcaactcctaaacaaattagagaacatatgcaagaagaaggcttaaccaatgatgaagtcaagagtcatttacagaaatacaggttacacatcaggaagccaaattcgaatgcggagaaacaatcagcagttgttttagggtttaacttgtggaattcttcagcacaagatgaagaagagacatgtgaaggaggagaatcattgaagagaagcaatgcgcaatcagattctcctcaaggtcctttgcagttaccgtctacaacaacaacaactggtggagatagtagcatggaagatgttgaagatgctaagtctgagagctttcaactggagagattgagatcaccataaatctcaagaaaccaaactcttgatcacggttttgttattttggattcattactatatctattagtagtgaatgagaacaataattatagaaaggtttatagatatatatatagagaaaaagagagagtgaggatggttcaaattatttgcaga

SEQ ID NO: 56 - protein, 333 aa, Arabidopsis thaliana
  G937 polypeptide
MGSLGDELSLGSIFGRGVSMNVVAVEKVDEHVKKLEEEKRKLESCQLELPLSLQILNDAILYLKDKRCSEMETQPLLKDFISVNKPIQGERGIELLKREELMREKKFQQWKANDDHTSKIKSKLEIKRNEEKSPMLLIPKVETGLGLGLSSSSIRRKGIVASCGFTSNSMPQPPTPAVPQQPAFLKQQALRKQRRCWNPELHRRFVDALQQLGGPGVATPKQIREHMQEEGLTNDEVKSHLQKYRLHIRKPNSNAEKQSAVVLGFNLWNSSAQDEEETCEGGESLKRSNAQSDSPQGPLQLPSTTTTTGGDSSMEDVEDAKSESFQLERLRSP

SEQ ID NO: 57 - DNA, 1218 bp, Arabidopsis thaliana
  G989
atgactacaaaacgcatagacagagatctcccatcttccgacgatccttcctccgctaaacgccgtatcgaattccccgaagaaacactcgaaaacgacggtgctgccgcaatcaaactccttagcttactcctccaatgcgccgaatacgtagctactgatcatctccgtgaagcttcaacacttttatccgaaatctccgagatatgttctccgttcggttcctcgccggagcgagtcgtcgcttacttcgctcaagcgctacaaacgcgcgtgatcagctcttacctctccggcgcgtgttctcccctctccgagaaaccactcactgttgttcagtctcagaaaatcttctccgccttgcagacttataactccgttagtcctctgatcaaattctcacatttcacggcgaatcaagccatttttcaggcgcttgacggagaagattccgttcatatcatcgatctcgatgttatgcaaggtcttcaatggccggctctatttcacatcctcgcttcacgtcctcgaaaactccgatcaattcgaatcaccggatttggttcctcctccgatctactcgcttcaactggccggagactcgccgatttcgcatcatcgttaaacctccctttcgaatttcatccaattgaaggcataatcggaaacctaatcgatccgagccaactcgcaacgagacaaggagaagctgtggtggttcattggatgcagcaccggttatatgatgttacagggaacaatctcgagacgttggagattctacggaggctgaaaccgaatctgatcacggtggtggagcaagaattgagctacgacgatggaggaagctttttaggaagattcgtggaggctttgcattattatagcgcgttgtttgacgcgctaggagatggattgggtgaagagagtggtgagagattcacggtggagcagattgttttggggacggagataagaaacattgtggcgcacggaggaggaagaaggaagagaatgaagtggaaagaagaactgagccgggtcgggtttagacctgtttcgcttcggggtaacccggcgacacaagcgggtttattgttgggtatgttaccgtggaatggatatactttggttgaagagaatggaaccctccgtcttggctggaaggatctctcgcttttgactgcctctgcctggaaatctcagccgttcgattga

SEQ ID NO: 58 - protein, 405 aa, Arabidopsis thaliana
  G989 polypeptide
MTTKRIDRDLPSSDDPSSAKRRIEFPEETLENDGAAAIKLLSLLLQCAEYVATDHLREASTLLSEISEICSPFGSSPERVVAYFAQALQTRVISSYLSGACSPLSEKPLTVVQSQKIFSALQTYNSVSPLIKFSHFTANQAIFQALDGEDSVHIIDLDVMQGLQWPALFHILASRPRKLRSIRITGFGSSSDLLASTGRRLADFASSLNLPFEFHPIEGIIGNLIDPSQLATRQGEAVVVHWMQHRLYDVTGNNLETLEILRRLKPNLITVVEQELSYDDGGSFLGRFVEALHYYSALFDALGDGLGEESGERFTVEQIVLGTEIRNIVAHGGGRRKRMKWKEELSRVGFRPVSLRGNPATQAGLLLGMLPWNGYTLVEENGTLRLGWKDLSLLTASAWKSQPFD

SEQ ID NO: 59 - DNA, 923 bp, Arabidopsis thaliana
  G1007
attccttcttgcctaggaactaattgttgcacacttcggtacacaattttttgagcacttcgacatcaaaacgagagagaaaagaatggtggattctcatggctccgacacggaatgttcctccaagaagaaaaaggagaaaacgaaagaaaagggggtatatcgtggggctcgcatgaggagctgggggaaatgggtctcggagattcgggagccccgtaagaaatcaagaatctggctcgggactttccccacggcggagatggcagcgcgtgcccatgatgttgcggcattgagtatcaaaggaagttccgcaatccttaacttccctgagctcgcggattttctgccaagaccagtctcgctcagccaacaggatatccaggccgcagccgccgaagccgctcttatggatttcaaaactgtaccattccatcttcaggatgactcaacgccgttgcaaactaggtgtgatactgagaagatcgaaaagtggtcatcctcatcgtcctcagcctcatcctcatcctcatcttcgtcctcgtcctcatcatctatgctttcgggggagctaggagatattgtggagttgccgagtcttgaaaacaatgtaaaatacgattgtgcgctgtatgactcgttggaggggctggtgtcgatgcccccatggttagatgctaccgaaaatgattttaggtatggagatgattcggtactgttggacccatgtctcaaagaaagctttttgtggaattatgagtaaggtttttttttggaaagaaatgtggttttttgtttcctcctctcttttatactttcgatctttttttctaagcatatatatcttctacatatgtaatacttttccattagtaaacaatgattcggtttcgggtacaaaaaaaaaaaaaaaaaaaaaaaaa

SEQ ID NO: 60 - protein, 225 aa, Arabidopsis thaliana
  G1007 polypeptide
MVDSHGSDTECSSKKKKEKTKEKGVYRGARMRSWGKWVSEIREPRKKSRIWLGTFPTAEMAARAHDVAALSIKGSSAILNFPELADFLPRPVSLSQQDIQAAAAEAALMDFKTVPFHLQDDSTPLQTRCDTEKIEKWSSSSSSASSSSSSSSSSSSSMLSGELGDIVELPSLENNVKYDCALYDSLEGLVSMPPWLDATENDFRYGDDSVLLDPCLKESFLWNYE

SEQ ID NO: 61 - DNA, 549 bp, Arabidopsis thaliana
  G1053
gaaactcttacatactcatataaaccaaactaaaaccatgattccggcagaaatcaacggatatttccaatatctatcaccggaatacaacgtaataaacatgccttcatctccaacctcttccttaaactacctaaacgatttgatcatcaacaacaacaactattcctcatcatccaacagtcaagatctcatgataagcaacaactcaacttccgacgaagatcatcatcaaagcatcatggtactcgacgagaggaaacagagaaggatgctttcgaacagagaatctgcaaggaggtcaaggatgaggaaacagagacatcttgatgaactctggtctcaggtaataaggcttcgcaacgagaacaactgtcttatcgataagctgaaccgcgtatcggagactcaaaattgtgtattgaaggagaactctaaactcaaagaagaagcttctgatctccgacagcttgtttgtgaactgaaatctaacaagaacaacaacaatagttttccaagagagtttgaagataattagtattactcaaa

SEQ ID NO: 62 - protein, 166 aa, Arabidopsis thaliana
  G1053 polypeptide
MIPAEINGYFQYLSPEYNVINMPSSPTSSLNYLNDLIINNNNYSSSSNSQDLMISNNSTSDEDHHQSIMVLDERKQRRMLSNRESARRSRMRKQRHLDELWSQVIRLRNENNCLIDKLNRVSETQNCVLKENSKLKEEASDLRQLVCELKSNKNNNNSFPREFEDN

SEQ ID NO: 63 - DNA, 2597 bp, Arabidopsis thaliana
  G1078
agtatagtgtagtgggaaagtctggaaacagctgtatctaactttttcccttttctctatgattctgttgtgaataatgcagagccgccgtgagctcaggcgccaccgtaacgaagaacaaacctgaaggagaaaaataagccatgggatgtgcggcgtccaagctcgataacgaagatgctgtacggcgttgtaaggatcgccgccgtctgatgaaagaagctgtctacgctcgtcatcatctcgccgccgctcacgccgattactgccgatcgcttcgtatcactggatctgctctttcctcattcgcctccggtgagcctctctctgtatctgatcaaactccggctgttttcctccatactccccctcctccgctttctgaacaatctccggctaaatttgtccctccacgtttttcgccgtcgcctgctccttcttctgtttatcctccttcgacgtctccttccgtcgccagttctaagcagccttcagtcatgtccacctcttccaatcgacgccggaaacagcaaccaaaacctagactgcctcatattctctcggagtcaagtcattcttcttctccgagaagtgagagatccaatttcatgcccaatttgtatcccagtgcttatcagaactctacttactccgctactccttctcatgcctcctccgtctggaactgggagaatttctaccctccttctcctcccgattccgaattcttcaacaggaaggctcaagagaagaaacataactccgataatcgattcaacgacgaggatacggaaacagtgaggtcagagtatgatttcttcgacacgaggaagcaaaagcagaagcagttcgaatcaatgagaaatcaggtggaggaagagacggagacggagagagaggaagtacagtgtagtgaatgggaggatcacgatcattacagcaccacgagctcctcggacgcagcggaggaagaggaagaagatgatgatagagaatcaatttccgaggtcgggacacgctccgagtttggatctacggtgagaagtaattcgatgagacggcatcatcaacaaccttcaccaatgccgcaagtatacggcggcgctgaacaaagtaaatatgataaagcagatgatgctacgatatcttctggtagctatagaggcggaggagatatcgctgacatgaagatggtagttaggcatagggatttgaaagaaatcatcgatgccattaaggaaaatttcgataaggctgctgcctcaggggagcaagtctctcagatgctcgagcttggcagagctgagctcgatcgtagtttcagccaattgaagaaaacggtgattcattcgagtagtttattaagcaacttgagctcgacatggacctcgaagccgccattggcagtcaagtataggatagacacgactgcgctggatcaaccgaacagttcgaagagcctttgttccactcttgaccgtctcttggcatgggagaagaagctttatgaagaaattaaggctagagaaggtttcaagattgagcatgagaagaagttatcacagcttcaaagccaagaatataaaggggaggatgaagctaagttagacaagacaaaggcctctataacgaggttacagtcactgatcattgttacttctcaagctgttactaccacatctactgccatcatccgtcttcgtgatactgaccttgttccacaactcgttgagctctgtcatggctttatgtacatgtggaaatctatgcatcaataccatgagactcagaacagcatcgtggagcaagtccgggggctcattaacagatcgggcaaaggcgaatcaacatctgagctacaccgacaagctacacgtgacttggaatcagctgtctcttcttggcactccagtttcagtagtttgattaaattccaacgtgacttcatacactcagttcacgcctggttcaagctgacccttcttccggtttgccaagaagacgccgccaatcatcacaaagagccgctcgatgcttacgccttctgcgatgagtggaaactcgctctagatcgtattcccgatacagttgcatctgaggcaatcaagagcttcatcaacgttgtacacgtgatatccgcaaaacaagccgatgaacacaagataaagaaaagaacagaatcagcatcaaaagagcttgagaagaaggcttcgtcggttagaaacctagagagaaaatactaccagtcatactcaatggttggtgtcggtttaccagagtcaggacccgataaccgacacatgttagacgctcgagacccgttaagcgataaaaagtcagagcttgcggtttgccaaaggagagttgaggaagagatggtgaaatactcaaaggcaatagaagtgacaagagccatgactttgaataatctgcagacagggttgcctggtgtgttccaatctttaacaagtttctctgctttgttcatggagtctcttcaaacggtatgcactcgctcatactctatcaaataggacattatatattatatatatatatatattgatatgcttacagagtttacagtaacaattgtg

SEQ ID NO: 64 - protein, 796 aa, Arabidopsis thaliana
  G1078 polypeptide
MGCAASKLDNEDAVRRCKDRRRLMKEAVYARHHLAAAHADYCRSLRITGSALSSFASGEPLSVSDQTPAVFLHTPPPPLSEQSPAKFVPPRFSPSPAPSSVYPPSTSPSVASSKQPSVMSTSSNRRRKQQPKPRLPHILSESSHSSSPRSERSNFMPNLYPSAYQNSTYSATPSHASSVWNWENFYPPSPPDSEFFNRKAQEKKHNSDNRFNDEDTETVRSEYDFFDTRKQKQKQFESMRNQVEEETETEREEVQCSEWEDHDHYSTTSSSDAAEEEEEDDDRESISEVGTRSEFGSTVRSNSMRRHHQQPSPMPQVYGGAEQSKYDKADDATISSGSYRGGGDIADMKMVVRHRDLKEIIDAIKENFDKAAASGEQVSQMLELGRAELDRSFSQLKKTVIHSSSLLSNLSSTWTSKPPLAVKYRIDTTALDQPNSSKSLCSTLDRLLAWEKKLYEEIKAREGFKIEHEKKLSQLQSQEYKGEDEAKLDKTKASITRLQSLIIVTSQAVTTTSTAIIRLRDTDLVPQLVELCHGFMYMWKSMHQYHETQNSIVEQVRGLINRSGKGESTSELHRQATRDLESAVSSWHSSFSSLIKFQRDFIHSVHAWFKLTLLPVCQEDAANHHKEPLDAYAFCDEWKLALDRIPDTVASEAIKSFINVVHVISAKQADEHKIKKRTESASKELEKKASSVRNLERKYYQSYSMVGVGLPESGPDNRHMLDARDPLSDKKSELAVCQRRVEEEMVKYSKAIEVTRAMTLNNLQTGLPGVFQSLTSFSALFMESLQTVCTRSYSIK

SEQ ID NO: 65 - DNA, 1362 bp, Arabidopsis thaliana
  G1226
ctgcatttattaagaacagtttagaaagtgtcaacccctaaaggaatgtttttagtttagaggaaagagagagaagaagaagcagcagcagaagttgttaatttgaagactatttgaggaaagacacctatatctaaatactcaaagttacaaaaatattacttcagaaaacagttccattagagagactcataaagcttctcatctaattatgagtggattgatgagttttggtgaattagaagaccaatttggtcagatttcagacactactatggaagagaagataccatttctgcaaatgcttcaatgcatagaacacccttttacaacaacagaaccaaatcagtttctccaatcacttctccagatccaaaccctagaatcaaagagctgtctcacccttgaaacaaacatcaaaagagatccgggtcaaacagatgacccggaaaaggatccaagaacagaaaacggagcagtaacggtcaaagaaaaaagaaaacggaaacgtacaagagctccaaagaacaaagacgaagttgaaaaccaaaggatgactcacattgccgtcgaacgtaatcgaagacgacaaatgaacgaacacttaaactctctccgatctctcatgcctccttcgtttcttcaacggggtgaccaagcttcgattgtaggaggggcaatagatttcatcaaggaactagagcaactcttgcaatctctagaagctgagaaacgaaaggatggaactgatgaaactcctaaaacggcgtcgtgttcttcatcttcgtctcttgcatgcactaactcttctatttctagcgtgtctacgacgtcggaaaatggatttacggcgagattcggcggtggagatacgacagaagtggaggctacggtgatacagaaccatgtgagcttaaaagttcggtgtaagagaggaaaacgacagatcttaaaagctattgtctcgattgaagaactaaagcttgcgattctacatctcactatctcttcttcctttgactttgtcatctactctttcaatctcaagatggaagatggttgtaaattaggatcagcagatgagatagcgacagccgttcatcagatcttcgagcaaatcaacggtgaagtcatgtggtcaaatcttagtcgaacttagttgacttttgactcctagtaacgtgtgtaaactttaggttacaaagaaaagggacgtgatataaataagaaaaaccaaagaggtgaaattttgggagttttaattattatcttatactttttggattttagattagtagcaaactcgcagtgttctacgatgacattattattggtcacatgaaggtttaggttaaaaaaaaa

SEQ ID NO: 66 - protein, 315 aa, Arabidopsis thaliana
  G1226 polypeptide
MSGLMSFGELEDQFGQISDTTMEEKIPFLQMLQCIEHPFTTTEPNQFLQSLLQIQTLESKSCLTLETNIKRDPGQTDDPEKDPRTENGAVTVKEKRKRKRTRAPKNKDEVENQRMTHIAVERNRRRQMNEHLNSLRSLMPPSFLQRGDQASIVGGAIDFIKELEQLLQSLEAEKRKDGTDETPKTASCSSSSSLACTNSSISSVSTTSENGFTARFGGGDTTEVEATVIQNHVSLKVRCKRGKRQILKAIVSIEELKLAILHLTISSSFDFVIYSFNLKMEDGCKLGSADEIATAVHQIFEQINGEVMWSNLSRT

SEQ ID NO: 67 - DNA, 1548 bp, Arabidopsis thaliana
  G1273
tcagattttcttcgttccctaactcctaaaaaggagagattcttcaaatccttatcacaacttcagtttttgcattcaccgtcgtgagtgttctacttttggtcaagtaatggaggtgaatgatggtgaaagagtggtaatagcaaaaccagttgcctcaagaccttcttcaagttctggcttcaggacattcactgagcttcttactgattcagttaccgtatctccgcaaacgacttgccacgagattgtagacgctgctataagaccaaagactttgagattcaatcagccagtagcagcttcggtctcatgtccacgggctgaagtaaaaggtattggaaatggaatgtcttgtgatgatgattcagatagcagaaactacgtcgtttataaaccgaaagcaaagcttgtctccaaagcaaccgtctctgcattggctaatatggggaatcgtcaacaaacttggagacaaagcgaagcagtatcctatgggaagagtgtgagccaaggtacacatcgagcaggtcctaatctagtccagaaagttccatcttttacggaatcagagacatctactggggatagatcttctgtggatggatacaactggaggaaatacggacagaagcaagttaaaggaagtgagtgtccaaggagttattacaaatgcacacacccgaaatgtccggtgaagaagaaagtagagagatcagtggaaggtcaagtttcagagattgtgtatcaaggtgaacataatcactcaaagccatcttgtcctcttccacggcgtgcttcatcatcaatctcttcagggtttcaaaaaccaccaaaatcgattgcttctgaaggatcaatgggacaagaccctaacaataatctctattctcctctatggaacaatcaaagcaatgactctactcaaaacagaacagagaagatgagtgaaggttgtgttattacaccatttgagtttgctgttccaagatcgacaaattcaaatcccggaacttcagattccggttgcaagagtagccaatgtgatgaaggagagcttgatgatccaagcagaagcaaaagaaggaagaacgagaagcaatctagtgaagcaggagtatcgcaaggctcagtggaatcagacagtcttgaagatggattcaggtggagaaagtatggacaaaaagtggtaggaggcaatgcgtatccaagaagttattacagatgcacaagtgctaattgcagagcaaggaaacatgttgaacgagcgagtgatgatccaagagctttcattacaacctacgagggtaaacataatcatcatttgctcttgagccctccatcttcctctactcttccctttaactccccacaactttctaagcaaacaatttgatttgatgatccattcatgctttttcttttttctttttctttttttgttaagaatgagaaaaaagaagaagcaaatggtaaatacaatcaccatttgctcttcactcacaacttcctaagcaaaagccatttgatcaattcatgcctgtttcttca

SEQ ID NO: 68 - protein, 427 aa, Arabidopsis thaliana
  G1273 polypeptide
MEVNDGERVVIAKPVASRPSSSSGFRTFTELLTDSVTVSPQTTCHEIVDAAIRPKTLRFNQPVAASVSCPRAEVKGIGNGMSCDDDSDSRNYVVYKPKAKLVSKATVSALANMGNRQQTWRQSEAVSYGKSVSQGTHRAGPNLVQKVPSFTESETSTGDRSSVDGYNWRKYGQKQVKGSECPRSYYKCTHPKCPVKKKVERSVEGQVSEIVYQGEHNHSKPSCPLPRRASSSISSGFQKPPKSIASEGSMGQDPNNNLYSPLWNNQSNDSTQNRTEKMSEGCVITPFEFAVPRSTNSNPGTSDSGCKSSQCDEGELDDPSRSKRRKNEKQSSEAGVSQGSVESDSLEDGFRWRKYGQKVVGGNAYPRSYYRCTSANCRARKHVERASDDPRAFITTYEGKHNHHLLLSPPSSSTLPFNSPQLSKQTI

SEQ ID NO: 69 - DNA, 1137 bp, Arabidopsis thaliana
  G1324
cgaaaacaccacaaaccaaatatcattaagtaattaggaaacttaaactaagtatggaaaattcgatgaagaagaagaagagcttcaaagaaagtgaagatgaagaactaagaagagggccttggactttggaggaagacacacttctcacaaattacatcctccataacggtgagggtcgttggaatcacgtcgccaaatgtgctgggctaaagagaactgggaaaagttgtagattgagatggttgaattacttgaaacccgacataagacgagggaatcttactcctcaagaacagcttttgatccttgagcttcactctaaatggggtaataggtggtccaagattgcacagtacttgccaggaagaacggataacgagatcaagaactattggagaacaagagttcaaaaacaagctcgtcaactcaacatcgaatctaacagcgacaagttctttgacgctgttcgtagtttttgggtccctagattgatcgagaagatggaacaaaactcatccactactactacttattgttgtccccaaaacaacaacaacaactctcttcttcttccttctcaatctcacgactctttaagtatgcaaaaagatatagattactcgggtttcagcaacatagacggttcttcttcaacttctacttgcatgtctcatctaacaacagttccacactttatggatcaaagcaacaccaatatcatcgatggctcgatgtgtttccatgaaggcaatgttcaagaattcggaggatatgttcctggcatggaggattacatggtaaactcggacatctcaatggaatgtcacgtggcggatggttattcagcgtacgaggatgttacacaagatcccatgtggaatgtggatgacatttggcagtttagggagtaattaagtcgtcaagagatgagatggtagagcctaccactacggttctattatatggactaatatacttcttttgcttaactaagcaaaaagtttcgaaccttttacccatattatctcgggttggagactagaacatgttaaatttgtatcttctttgttgcgagtacttactaagtcattggataaatatttataatgatagtttcttgtacaaaaaaaaaaa

SEQ ID NO: 70 - protein, 286 aa, Arabidopsis thaliana
  G1324 polypeptide
MENSMKKKKSFKESEDEELRRGPWTLEEDTLLTNYILHNGEGRWNHVAKCAGLKRTGKSCRLRWLNYLKPDIRRGNLTPQEQLLILELHSKWGNRWSKIAQYLPGRTDNEIKNYWRTRVQKQARQLNIESNSDKFFDAVRSFWVPRLIEKMEQNSSTTTTYCCPQNNNNNSLLLPSQSHDSLSMQKDIDYSGFSNIDGSSSTSTCMSHLTTVPHFMDQSNTNIIDGSMCFHEGNVQEFGGYVPGMEDYMVNSDISMECHVADGYSAYEDVTQDPMWNVDDIWQFRE

SEQ ID NO: 71 - DNA, 1161 bp, Arabidopsis thaliana
  G1328
aattcaatcactatatttttttaaaaacatttgacttcatcgatcggttaacaattaatcaaaaagatgggacgatcaccatgttgtgagaagaagaatggtctcaagaaaggaccatggactcctgaggaggatcaaaagctcattgattatatcaatatacatggttatggaaattggagaactcttcccaagaatgctgggttacaaagatgtggtaagagttgtcgtctccggtggaccaactatctccgaccagatattaagcgtggaagattctcttttgaagaagaagaaaccattattcaacttcacagcatcatgggaaacaagtggtctgcgattgcggctcgtttgcctggaagaacagacaacgagatcaaaaactattggaacactcacatcagaaaaagacttctaaagatgggaatcgacccggttacacacactccacgtcttgatcttctcgatatctcctccattctcagctcatctatctacaactcttcgcatcatcatcatcatcatcatcaacaacatatgaacatgtcgaggctcatgatgagtgatggtaatcatcaaccattggttaaccccgagatactcaaactcgcaacctctctcttttcaaaccaaaaccaccccaacaacacacacgagaacaacacggttaaccaaaccgaagtaaaccaataccaaaccggttacaacatgcctggtaatgaagaattacaatcttggttccctatcatggatcaattcacgaatttccaagacctcatgccaatgaagacgacggtccaaaattcattgtcatacgatgatgattgttcgaagtccaattttgtattagaaccttattactccgactttgcttcagtcttgaccacaccttcttcaagcccgactccgttaaactcaagttcctcaacttacatcaatagtagcacttgcagcaccgaggatgaaaaagagagttattacagtgataatatcactaattattcgtttgatgttaatggttttctccaattccaataaacaaaacgccattggaatagagttatgtaaacatgcaatcattgtatttgttatatagattttgttacatatccaaaatccaaaatactatagttttaaaataaaaaaaaaaaaaaaaaa

SEQ ID NO: 72 - protein, 324 aa, Arabidopsis thaliana
  G1328 polypeptide
MGRSPCCEKKNGLKKGPWTPEEDQKLIDYINIHGYGNWRTLPKNAGLQRCGKSCRLRWTNYLRPDIKRGRFSFEEEETIIQLHSIMGNKWSAIAARLPGRTDNEIKNYWNTHIRKRLLKMGIDPVTHTPRLDLLDISSILSSSIYNSSHHHHHHHQQHMNMSRLMMSDGNHQPLVNPEILKLATSLFSNQNHPNNTHENNTVNQTEVNQYQTGYNMPGNEELQSWFPIMDQFTNFQDLMPMKTTVQNSLSYDDDCSKSNFVLEPYYSDFASVLTTPSSSPTPLNSSSSTYINSSTCSTEDEKESYYSDNITNYSFDVNGFLQFQ

SEQ ID NO: 73 - DNA, 968 bp, Arabidopsis thaliana
  G1444
cagtccttctttggtgcaaagatcccaaaaaatcaaaatcgaaagagagaataaatcaaaaggaagaatctttatctgctttctctcgatgaggatccggaaacgacaagtgcctcttcctttatcgtctctattaccagttcctctatcagatctctactttaaccgctcaccgacggccaccgcgagatactttcgcggtggttataaagacggcggtgatgattttggttctcttcagctttcgcttccgccgccgtcgcagatttctgatcggcttattcaaagagatttgataaagaagaaggaggaggtcaaggctttggatgatgataatggtgatgtagacgtcaagagtcgtactgatgcatcgggcagcaagaatgttaatccccgaggagaatccgtctcttcaatacaagttgtcgagaagaatgaaaaggttgtgtctttgaggaagagaagaggctttatcaactttgaggattacgaagatgaggaagatgaagaagctagtggcggtggaggccgtattaataaagggaaaaagaaagcgaaaaagagcggtggtgggttagaggaaggatcacggtgcagccgtgttaacggtagaggatggagatgttgtcagcaaacgcttgttggttattctctttgtgagcatcatctcggtaaaggaagggtaaggagcatgaacaagagtggtggtggtcgtggcggcgagaaaaaggcggtggtggtggaagtgaagaagaagagagtaaagcttggcatggtaaaggcacgttcaataagtagtttgcttggacaaaccagcactagtggtggtactagtggtgatgttgatcagggtgagataagtgcacctgctgatcagttcgctgcatgtgataagtaggtctgttgatcagcatttgcatgtatatggatatgtgtatgtttatgtacatgatgataatgggcatagc

SEQ ID NO: 74 - protein, 269 aa, Arabidopsis thaliana
  G1444 polypeptide
MRIRKRQVPLPLSSLLPVPLSDLYFNRSPTATARYFRGGYKDGGDDFGSLQLSLPPPSQISDRLIQRDLIKKKEEVKALDDDNGDVDVKSRTDASGSKNVNPRGESVSSIQVVEKNEKVVSLRKRRGFINFEDYEDEEDEEASGGGGRINKGKKKAKKSGGGLEEGSRCSRVNGRGWRCCQQTLVGYSLCEHHLGKGRVRSMNKSGGGRGGEKKAVVVEVKKKRVKLGMVKARSISSLLGQTSTSGGTSGDVDQGEISAPADQFAACDK

SEQ ID NO: 75 - DNA, 1092 bp, Arabidopsis thaliana
  G1462
cattcttgcgattgatctttctctagataatttttttgatcgatttagtttcattatggaggacgacgacgcagcttatgatctaatcaaacacgaactgttatactcagaagacgaagtaataatctcacgttatctgaagggtatggtcgttaacggagattcttggccagatcacttcatcgaagacgcaaacgtgttcaccaagaatccagataaggtgttcaattctgagagacctagattcgtgatcgttaaaccacgaacagaggcttgtggtaaaaccgatggatgtgattcgggttgctggaggatcattggtcgtgataaactgataaagtcggaggagactgggaagattctagggttcaagaagatactcaagttttgcctaaagaggaaacctatagactacaagagaagttgggtaatggaagagtataggcttaccaataacttgaactggaagcaagatcatgtgatttgcaaaattcggtttatgtttgaagctgaaattagtttcttgctaagcaagcatttctacactacatcagaatcggttcttgaaaatgagctgttgccatcttatggatattatttatccaatacacaagaggaggatgaattttatctggacgcgataatgacttcggaaggaaacgagtggcctagctacgttaccaacaacgtgtactgtctgcatccattggagcttgtggatcttcaagatcggatgtttaatgattacggaacctgcatcttcgctaacaagacttgtggtgaaactgataaatgcgatggtggttactggaagatcctgcacggtgataagctgatcaagtcaaatttcggaaaggtcattggtttcaagaaggtatttgagttctatgaaacggtgagacaaatatatctttgtgatggagaagaagtgacggtaacttggactatacaagagtataggcttagcaaaaacgtgaagcagaataaagtgttgtgcgttatcaagttgacttatgatagataggatactttactttggtttttgtgatcatcttagtatcttacgaatattctagatacacacatctatag

SEQ ID NO: 76 - protein, 322 aa, Arabidopsis thaliana
  G1462 polypeptide
MEDDDAAYDLIKHELLYSEDEVIISRYLKGMVVNGDSWPDHFIEDANVFTKNPDKVFNSERPRFVIVKPRTEACGKTDGCDSGCWRIIGRDKLIKSEETGKILGFKKILKFCLKRKPIDYKRSWVMEEYRLTNNLNWKQDHVICKIRFMFEAEISFLLSKHFYTTSESVLENELLPSYGYYLSNTQEEDEFYLDAIMTSEGNEWPSYVTNNVYCLHPLELVDLQDRMFNDYGTCIFANKTCGETDKCDGGYWKILHGDKLIKSNFGKVIGFKKVFEFYETVRQIYLCDGEEVTVTWTIQEYRLSKNVKQNKVLCVIKLTYDR

SEQ ID NO: 77 - DNA, 1142 bp, Arabidopsis thaliana
  G1463
agtttgagatttgcttcatccggtttttttattttctgcaaaatatgtcactctctcccattttgttcatatataatatgtttgaagtttgatcaacttagtatgcgtttctttttctctctagttcctctgtttcttggtcgatttagtttcgttatggcggacacactgctcaacgcagaagacgaagtaataatctcacgttatctgaagcctatgatcgttaacagagtatcatggcctgatctcttcatcgaagacgcagacgtgttcaacaaggatccatatgtgaagttccatgctgagatccctagcttcgtgatcgttaaaccacgaacaaaggcttgtggtaaaaccgatggatgtgattcgggttgctggaggatcattggtcgtgataagctgataaagtcggaggagactggtaagattctagggttcaagaagatactcaagttctgcctaaagtggaaacctagagaatacaagagaagtttggtaatggaagagtataggcttaccaataacttcaactggaagcaagatcatgtgatttgcaagattcggcttttgtttgaagcagaaattagtttcttgctagccaagcatttctacactacatcagactcacttcctcgaaatgtgctgttgccagcttatggattctgttcaccagataaacaagaggaggacgaattttatccggtgacgataatgatttcagaaggaaaagattggcctagctacgttaccaacaacgtgtattgtctgcatccatcggagcttgtgaatgttcacgatgggaagtttcatgataacggaatctgcatcttcgctaacaggacttgtggtgtaaccgataaatgcaatgaaggttactggaagattaagcaccgtgagaagctgatcatgtcacggtacgggcagaccattggttggaagaaagtttttcagttttatgaaacggagaaagaaagacattttggtaatggagaagaagtgaaggtaacttggactctaaaagagtataggcttaccagaaaaatgaacaagaataaagtggtgtgcgttatcaagtataaggtaaagtgtttaccgaggataactagctagggacttctactcttggtttcatgatcgat

SEQ ID NO: 78 - protein, 336 aa, Arabidopsis thaliana
  G1463 polypeptide
MRFFFSLVPLFLGRFSFVMADTLLNAEDEVIISRYLKPMIVNRVSWPDLFIEDADVFNKDPYVKFHAEIPSFVIVKPRTKACGKTDGCDSGCWRIIGRDKLIKSEETGKILGFKKILKFCLKWKPREYKRSLVMEEYRLTNNFNWKQDHVICKIRLLFEAEISFLLAKHFYTTSDSLPRNVLLPAYGFCSPDKQEEDEFYPVTIMISEGKDWPSYVTNNVYCLHPSELVNVHDGKFHDNGICIFANRTCGVTDKCNEGYWKIKHREKLIMSRYGQTIGWKKVFQFYETEKERHFGNGEEVKVTWTLKEYRLTRKMNKNKVVCVIKYKVKCLPRITS

SEQ ID NO: 79 - DNA, 396 bp, Arabidopsis thaliana
  G1481
atggggaagaagtgtgatttatgtaacggtgttgcaagaatgtattgcgagtcagatcaagctagtttatgttgggattgcgacggtaaagttcacggcgctaatttcttggtagctaaacacacgcgttgtcttctctgtagcgcttgtcagtctcttacgccgtggaaagctactgggcttcgtcttggcccaactttctccgtctgcgagtcatgcgtcgctcttaaaaacgccggcggtggccgtggaaacagagttttatcggagaatcgtggtcaggaggaggttaatagtctctgctccgatgatgagatcggaagctcttcagctcaagggtcaaactattctcggccgttgaagcgatcggcgtttaaatcaacggttgttgtttaa

SEQ ID NO: 80 - protein, 131 aa, Arabidopsis thaliana
  G1481 polypeptide
MGKKCDLCNGVARMYCESDQASLCWDCDGKVHGANFLVAKHTRCLLCSACQSLTPWKATGLRLGPTFSVCESCVALKNAGGGRGNRVLSENRGQEEVNSLCSDDEIGSSSAQGSNYSRPLKRSAFKSTVVV

SEQ ID NO: 81 - DNA, 876 bp, Arabidopsis thaliana
  G1504
atgaataacgatttgtggttacctgaagaggacttcaagggtctaccggataatttccttgataatctcgttgatcctaccaatgatgtttctgtagaagatatagagaccggcgatgatgagggagattgggatgccaaatttcaaaagctcgtacctccaccattggatgagctaatgagtttgtcctatgagttcacttgcaatggacagcgtgtgcaagttcagaagcatgtgccaattttgaagcagtcgagttcttcagaagtcttctctactgttgataactcccctcctaatgtcaaagtctcaaagttgttgcaatctttaagcccagtctcagtcctcaagaacaccaacggttctggctcaccccaaaacccaaacggagatcagaaactggcctttctcgtgaaaggcatcagaagcaagcgcaaacgccccacactactgagagttacattcctcaaatcatttctattagagatgtcacagcagtttgctccggatgaatctgaatcttctgagatttccgccttgaagaaacgcaagaagaacaagagtcgtcgcttgaaatgcactcattgcgagacaaccactaccccgcagtggagggaaggacctaatgggcgtaaaaccctttgcaatgcttgtggaatccgctttagatcgggccgtcttgttttagaataccgtccagcagcaagcccgaccttcatcccaaccgtgcattcaaatttgcacaagaagatcatatatatgagaatgaaagataacgaccagtttgataccagaaagatccgtgctgagacatccggaccagagactagatcaaggcttcgtaacttcggcagaccaatgagttatggtcaatga

SEQ ID NO: 82 - protein, 291 aa, Arabidopsis thaliana
  G1504 polypeptide
MNNDLWLPEEDFKGLPDNFLDNLVDPTNDVSVEDIETGDDEGDWDAKFQKLVPPPLDELMSLSYEFTCNGQRVQVQKHVPILKQSSSSEVFSTVDNSPPNVKVSKLLQSLSPVSVLKNTNGSGSPQNPNGDQKLAFLVKGIRSKRKRPTLLRVTFLKSFLLEMSQQFAPDESESSEISALKKRKKNKSRRLKCTHCETTTTPQWREGPNGRKTLCNACGIRFRSGRLVLEYRPAASPTFIPTVHSNLHKKIIYMRMKDNDQFDTRKIRAETSGPETRSRLRNFGRPMSYGQ

SEQ ID NO: 83 - DNA, 828 bp, Arabidopsis thaliana
  G1543
atgataaaactactatttacgtacatatgcacatacacatataaactatatgctctatatcatatggattacgcatgcgtgtgtatgtataaatataaaggcatcgtcacgcttcaagtttgtctcttttatattaaactgagagttttcctctcaaactttaccttttcttcttcgatcctagctcttaagaaccctaataattcattgatcaaaataatggcgattttgccggaaaactcttcaaacttggatcttactatctccgttccaggcttctcttcatcccctctctccgatgaaggaagtggcggaggaagagaccagctaaggctagacatgaatcggttaccgtcgtctgaagacggagacgatgaagaattcagtcacgatgatggctctgctcctccgcgaaagaaactccgtctaaccagagaacagtcacgtcttcttgaagatagtttcagacagaatcatacccttaatcccaaacaaaaggaagtacttgccaagcatttgatgctacggccaagacaaattgaagtttggtttcaaaaccgtagagcaaggagcaaattgaagcaaaccgagatggaatgcgagtatctcaaaaggtggtttggttcattaacggaagaaaaccacaggctccatagagaagtagaagagcttagagccataaaggttggcccaacaacggtgaactctgcctcgagccttactatgtgtcctcgctgcgagcgagttacccctgccgcgagcccttcgagggcggtggtgccggttccggctaagaaaacgtttccgccgcaagagcgtgatcgttga

SEQ ID NO: 84 - protein, 275 aa, Arabidopsis thaliana
  G1543 polypeptide
MIKLLFTYICTYTYKLYALYHMDYACVCMYKYKGIVTLQVCLFYIKLRVFLSNFTFSSSILALKNPNNSLIKIMAILPENSSNLDLTISVPGFSSSPLSDEGSGGGRDQLRLDMNRLPSSEDGDDEEFSHDDGSAPPRKKLRLTREQSRLLEDSFRQNHTLNPKQKEVLAKHLMLRPRQIEVWFQNRRARSKLKQTEMECEYLKRWFGSLTEENHRLHREVEELRAIKVGPTTVNSASSLTMCPRCERVTPAASPSRAVVPVPAKKTFPPQERDR

SEQ ID NO: 85 - DNA, 1164 bp, Arabidopsis thaliana
  G1635
atggcgtcgtctccgttgactgcaaatgttcagggtaccaacgcttctttgaggaatagagatgaagaaactgcagacaagcagatacaattcaatgaccaaagttttgggggaaatgactatgcacccaaggtacggaagccatacacgataacaaaagagagagagagatggacagatgaagagcacaagaagtttgttgaagccttgaaattatacgggcgagcttggagacgaatagaagaacatgtgggctcaaagaccgcagttcagattcgaagccatgctcagaagtttttctctaaggttgctcgagaagcaactggaggtgatgggagctcagtagagccgattgtaatacctcctcctcgtcccaagagaaagccagcgcatccgtaccctcgtaagtttgggaacgaggcagatcaaacaagtagatcggtttctccctcagaacgtgatactcaatctccaacctctgtgttgtccactgttggatcagaagcattgtgttcccttgattcgagttcacccaatcgaagcttgtccccagtttcttctgcatcaccaccagctgctcttacaaccactgcaaatgcacctgaagagcttgagactctgaagctggagttgtttcctagtgagagactcttaaacagggagagctcgatcaaggaaccaacgaagcaaagtcttaaactctttgggaagacagttttggtatctgattcaggcatgtcctcttctctaacaacttcaacatattgtaaatccccaattcagccattaccacggaaactctcatcatccaagacactacccataataagaaactcacaagaagaactcttgagctgctggatacaagtccctcttaagcaagaagatgtggaaaatagatgtttggattcaggaaaggctgtccaaaacgaaggatcatcgactggatcaaacactggttcggtggatgatacgggacacacggaaaagaccacagaacccgaaacaatgctatgtcaatgggagtttaaaccaagtgagaggtctgcattttctgagctcagaagaacaaactccgagtcaaattcaagaggatttggtccatacaagaagagaaagatggtaacagaagaagaagagcatgagattcatctccacttataa

SEQ ID NO: 86 - protein, 387 aa, Arabidopsis thaliana
  G1635 polypeptide
MASSPLTANVQGTNASLRNRDEETADKQIQFNDQSFGGNDYAPKVRKPYTITKERERWTDEEHKKFVEALKLYGRAWRRIEEHVGSKTAVQIRSHAQKFFSKVAREATGGDGSSVEPIVIPPPRPKRKPAHPYPRKFGNEADQTSRSVSPSERDTQSPTSVLSTVGSEALCSLDSSSPNRSLSPVSSASPPAALTTTANAPEELETLKLELFPSERLLNRESSIKEPTKQSLKLFGKTVLVSDSGMSSSLTTSTYCKSPIQPLPRKLSSSKTLPIIRNSQEELLSCWIQVPLKQEDVENRCLDSGKAVQNEGSSTGSNTGSVDDTGHTEKTTEPETMLCQWEFKPSERSAFSELRRTNSESNSRGFGPYKKRKMVTEEEEHEIHLHL

SEQ ID NO: 87 - DNA, 942 bp, Arabidopsis thaliana
  G1638
gattcgatcaacaatcgttgaaaacatgaacagaggaatcgaagttatgtcaccagcaacatatctagagacatcaaactggttgtttcaagaaaacagaggaaccaaatggacagctgaagaaaacaagaaattcgaaaacgctttagccttttacgacaaagatactcccgacagatggtccagagtcgctgccatgcttcccggtaaaacagtcggagatgtgatcaaacaatacagagagcttgaggaagacgttagcgacatcgaagctggtcttataccaatccctggttacgcctctgattcattcacacttgattggggtggctacgacggagcaagcggtaacaatgggtttaacatgaacggttactacttttccgccgccggaggaaagagaggatccgccgcacgaacggcggagcatgagaggaagaaaggtgttccatggacagaagaagaacacagacaatttctgatgggtttgaagaaatatggaaaaggagattggagaaacatagctcgtaactttgtgaccacaagaacgccaacgcaagtcgcaagtcacgctcaaaagtatttcatacggcaagtcaatggtggcaaagacaaacgccgttcaagcatccatgatatcacaaccgtcaacatccccgactctcctgacgctgcagccgcggataacgcaaccgcaaacgcaccttgctcgccaccttccgtaggaggaaaccagcgggagacatcggagtgggaaggtcaaacactatacgatgaaacggcagctgcgttttataatcaaaacgcgttttcagaaacgctacttggaatgtcttcgacgccctacatggcaaaacttcaggagcagagttttctgaacgcatcgcaattcgaatcgtacaatgcgtatctccaaatgtagctcacaaggtgaagatctcg

SEQ ID NO: 88 - protein, 298 aa, Arabidopsis thaliana
  G1638 polypeptide
MNRGIEVMSPATYLETSNWLFQENRGTKWTAEENKKFENALAFYDKDTPDRWSRVAAMLPGKTVGDVIKQYRELEEDVSDIEAGLIPIPGYASDSFTLDWGGYDGASGNNGFNMNGYYFSAAGGKRGSAARTAEHERKKGVPWTEEEHRQFLMGLKKYGKGDWRNIARNFVTTRTPTQVASHAQKYFIRQVNGGKDKRRSSIHDITTVNIPDSPDAAAADNATANAPCSPPSVGGNQRETSEWEGQTLYDETAAAFYNQNAFSETLLGMSSTPYMAKLQEQSFLNASQFESYNAYLQM

SEQ ID NO: 89 - DNA, 1127 bp, Arabidopsis thaliana
  G1640
ctctcactcaagggtccaaaagtgttttctctttttcagtttctctttctctttttgacagaagagaccgagaagcaatgggaagggctccgtgttgtgagaaaatcgggttgaagagagggagatggacagccgaggaagatgagatcctcaccaagtatattcagaccaatggtgaaggttcttggcgatctttgcctaagaaagctggattgttgagatgtggaaagagctgtagactaaggtggataaactacttaagaagagacttaaaaagaggaaatattacttccgacgaagaagaaataatcgtcaagttgcattcccttctcggcaacagatggtcacttattgcaacacatctaccaggaagaacagacaacgaaattaaaaactattggaactcacatctcagccgcaaaatctatgccttcactgccgtttccggagatggacacaatctactcgtcaacgatgtagtcttgaagaaatcttgttcatcgtcttctggagccaagaacaataacaagaccaagaagaagaagaagggaaggactagtaggtcatccatgaagaaacacaagcaaatggtgacggcctcacaatgtttctcacaacctaaggagctagagagtgatttcagtgagggagggcaaaatggtaattttgaaggagagtctttggggccttatgagtggttggatggtgagttagaacggctcttgagtagttgtgtctgggaatgcactagtgaagaggctgtgattggagtaaatgatgaaaaggtgtgtgagagtggggacaatagtagttgttgtgttaatttgtttgaagaagaacaaggaagcgagacaaagattggtcacgtaggaatcacagaggttgatcatgatatgacggtggaaagagaaagagagggaagttttttaagttcgaattcaaatgaaaataatgataaagattggtgggttggtctatgtaattcttcagaagttgggtttggggttgatgaggagttgcttgattgggagtttcaaggtaatgtcacttgtcaaagtgatgatctatgggatctctcagatattggagagataacattggagtgattgtaccgagcaagtggattg

SEQ ID NO: 90 - protein, 342 aa, Arabidopsis thaliana
  G1640 polypeptide
MGRAPCCEKIGLKRGRWTAEEDEILTKYIQTNGEGSWRSLPKKAGLLRCGKSCRLRWINYLRRDLKRGNITSDEEEIIVKLHSLLGNRWSLIATHLPGRTDNEIKNYWNSHLSRKIYAFTAVSGDGHNLLVNDVVLKKSCSSSSGAKNNNKTKKKKKGRTSRSSMKKHKQMVTASQCFSQPKELESDFSEGGQNGNFEGESLGPYEWLDGELERLLSSCVWECTSEEAVIGVNDEKVCESGDNSSCCVNLFEEEQGSETKIGHVGITEVDHDMTVEREREGSFLSSNSNENNDKDWWVGLCNSSEVGFGVDEELLDWEFQGNVTCQSDDLWDLSDIGEITLE

SEQ ID NO: 91 - DNA, 1144 bp, Arabidopsis thaliana
  G1645
cgtcgacctcccaacactaactccatgtttataacggaaaaacaagtgtggatggatgagatcgtcgcaagaagagcttcttcttcttgggacttccctttcaacgacattaatattcatcagcatcatcatcgtcactgcaacacaagtcatgagtttgaaatcttgaagagtcctcttggagatgtagcggttcacgaagaagagagtaataataataaccctaatttcagtaacagcgagagtggtaagaaggagacaacagatagtggtcagtcttggtcctcgtcgtcttcaaaaccatcggtcttggggagaggacattggagaccagctgaagatgttaaactcaaagagcttgtctccatttacggcccacaaaactggaacctcatagctgaaaagcttcaaggaagatctgggaagagctgtagactacgatggtttaaccaattggacccgaggataaaccgaagagctttcacagaagaagaagaggagaggctgatgcaagcacataggctttatggtaacaaatgggcaatgattgcgaggcttttccctggtagaactgataattcagtgaagaaccattggcatgttgtcatggctcgtaagtatagagaacactcttctgcttaccgtaggagaaagcttatgagtaataatccacttaaacctcacctcaccaataatcatcatcctaaccctaaccctaattaccactcttttatctccactaatcattacttcgctcagcctttccccgagtttaatttgactcatcacctggttaataatgcccctatcacgagtgaccataaccagcttgtgttgcctttccattgctttcaaggttatgagaacaatgaacctccgatggttgtgagtatgtttggcaaccaaatgatggtcggcgataacgttggtgccacgtcagacgcgttatgcaatattccgcacattgaccctagtaaccaagagaaaccggagccaaatgatgcaatgcattggatcggaatggacgcggtagatgaggaggtgttcgaaaaggctaagcagcaaccacattttttcgattttcttggcttggggacggcgtgaatgttgaacaaattggtgttaatcagataacgacagtggc

SEQ ID NO: 92 - protein, 359 aa, Arabidopsis thaliana
  G1645 polypeptide
MFITEKQVWMDEIVARRASSSWDFPFNDINIHQHHHRHCNTSHEFEILKSPLGDVAVHEEESNNNNPNFSNSESGKKETTDSGQSWSSSSSKPSVLGRGHWRPAEDVKLKELVSIYGPQNWNLIAEKLQGRSGKSCRLRWFNQLDPRINRRAFTEEEEERLMQAHRLYGNKWAMIARLFPGRTDNSVKNHWHVVMARKYREHSSAYRRRKLMSNNPLKPHLTNNHHPNPNPNYHSFISTNHYFAQPFPEFNLTHHLVNNAPITSDHNQLVLPFHCFQGYENNEPPMVVSMFGNQMMVGDNVGATSDALCNIPHIDPSNQEKPEPNDAMHWIGMDAVDEEVFEKAKQQPHFFDFLGLGTA

SEQ ID NO: 93 - DNA, 1423 bp, Arabidopsis thaliana
  G1650
tcgacagtcacaaatgtccatatgagtttctgggcgacttctatcagaatttttgttcataattttttttattgtatcaagggatgacttggaaaccgaagatgcttatattatcccatgatctaatctcaccagaaaaatacatcatgggtgaagatgatatcgtggagctcttagggaagagcagccaagtagttacaagtagccagacacaaacaccctcttgcgatcctcctctcattctccggggcagcggaagcggggacggagaaggaaatggtcctctaccgcagcctccgcctcccctgtaccatcagcagagtctctttatccaagaagacgaaatggcttcttggcttcaccagcctaatcgccaagattatctctactcccaacttctttactccggagtagcctcgactcacccgcaaagtttggcctccctagaaccaccaccaccacctagggctcagtacattctggcggcggatagaccgaccggtcatattttggccgagagaagggcggagaattttatgaatatctcgaggcaaagagggaacatatttcttggcggtgttgaagctgtaccgtcgaactcgaccctgttgtcttcagccactgaatcaataccagcgactcacggcaccgagagtcgagcaacagtcactggcggagtatctcgtacttttgcagttcctggtcttggtccgaggggaaaggcggtggcgattgagacggcgggaacacaatcttgggggttgtgcaaggccgaaacagagccggttcagagacaaccagcgacggagacggatatcaccgatgaacggaagagaaaaacgagagaggaaacaaatgtcgaaaaccagggaactgaagaagctcgtgattcgacgtctagtaagaggtcacgagctgcaataatgcataaactctccgaaaggagacggagacaaaagattaacgagatgatgaaggctttgcaagaactccttcctcgctgcacaaagactgatagatcttccatgctggatgatgttatagagtacgtgaaatctctacagagccaaatacaggatgttctcaatgggacatgttatgattccaccgatgatgtatgcggggaatatacaacaacagtacatgccccacatggccatgggtatgaatcggcctcctgcattcatacctttccctaggcaggctcatatggcggaaggtgtaggtcctgttgatttatttagagagaatgaagaaacagagcaagagacaatgtctcttctccttagagaagacaaaagaacaaaacagaaaatgttttcttgaactgaaacttgttagttcttttattaagacaagacacactcttatatacatgttcacataactactctacgttggtaacagttgtaacttctccagc

SEQ ID NO: 94 - protein, 371 aa, Arabidopsis thaliana
  G1650 polypeptide
MTWKPKMLILSHDLISPEKYIMGEDDIVELLGKSSQVVTSSQTQTPSCDPPLILRGSGSGDGEGNGPLPQPPPPLYHQQSLFIQEDEMASWLHQPNRQDYLYSQLLYSGVASTHPQSLASLEPPPPPRAQYILAADRPTGHILAERRAENFMNISRQRGNIFLGGVEAVPSNSTLLSSATESIPATHGTESRATVTGGVSRTFAVPGLGPRGKAVAIETAGTQSWGLCKAETEPVQRQPATETDITDERKRKTREETNVENQGTEEARDSTSSKRSRAAIMHKLSERRRRQKINEMMKALQELLPRCTKTDRSSMLDDVIEYVKSLQSQIQDVLNGTCYDSTDDVCGEYTTTVHAPHGHGYESASCIHTFP

SEQ ID NO: 95 - DNA, 541 bp, Arabidopsis thaliana
  G1659
agaacttaaagcctgaaactcattctcaatcaaatggagccaaatattccgatccaaagaggagatgagcagtcaaaagttattaaggcatggaaggaactaaagataacaaaggtcaataacaagactcagaagaagctactagatatttcaggatgggagaaaaagaaaactacaaagatcgaatctgaactcgctagaattcagcggaagatggacagtaagaagatggagaaatctgagaaactaaggaacgaaaaagcggcagttcatgcaaaggcacaaaagaagaaggcagatgttcaaaccagacgggctcaagagatccttgatgcggaagaagctgctgctaggtttcaagccgcaggaaagatacccaagaagtcatctttgagctgcttctgagatcagcactaacctgtgatacagattatcacctatctccggtatcctatgttcatacttgtatcttttgtatgttgtgtgttttgcttgtgttgctcataaaacaagagagtgcaaaattcattgtccataaaaa

SEQ ID NO: 96 - protein, 123 aa, Arabidopsis thaliana
  G1659 polypeptide
MEPNIPIQRGDEQSKVIKAWKELKITKVNNKTQKKLLDISGWEKKKTTKIESELARIQRKMDSKKMEKSEKLRNEKAAVHAKAQKKKADVQTRRAQEILDAEEAAARFQAAGKIPKKSSLSCF

SEQ ID NO: 97 - DNA, 933 bp, Arabidopsis thaliana
  G1752
aaaaaaaaaaaaaaaaaaaaacttatggaatattcccaatcttccatgtattcatctccaagttcttggagctcatcacaagaatcactcttatggaacgagagctgtttcttggatcaatcatctgaacctcaagccttcttttgccctaattatgattactccgatgactttttctcatttgagtcaccggagatgatgattaaggaagaaattcaaaacggcgacgtttctaactccgaagaagaagaaaaggttggaattgatgaagaaagatcatacagaggagtgaggaaaaggccgtgggggaaatttgcagcggagataagagattcaacgaggaatggaattagggtttggctcgggacatttgacaaagccgaggaagccgctcttgcttatgatcaagcggctttcgccacaaaaggatctcttgcaacacttaatttcccggtggaagtggttagagagtcgctaaagaaaatggagaatgtgaatcttcatgatggaggatctccggttatggccttgaagagaaaacattctcttcgaaaccggcctagagggaaaaagcgatcctcttcttcttcttcttcttcttctaattcttcttcttgctcttcttcttcgtctacttcttcaacatcaagaagtagtagtaagcagagtgttgtgaagcaagaaagtggtacacttgtggtttttgaagatttaggtgctgagtatttagaacaacttcttatgagctcatgttgatcttgtaattgatttcagcaaaagccactattaaactttaattttgtgataattaatcttgaaatttgttttgttcattctgcaatttctttggttctcttattttttgtttgttgtatccaaatgaaattattggaagagatggtgatgttaaagtgtatatatataaaaaaaaaa

SEQ ID NO: 98 - protein, 243 aa, Arabidopsis thaliana
  G1752 polypeptide
MEYSQSSMYSSPSSWSSSQESLLWNESCFLDQSSEPQAFFCPNYDYSDDFFSFESPEMMIKEEIQNGDVSNSEEEEKVGIDEERSYRGVRKRPWGKFAAEIRDSTRNGIRVWLGTFDKAEEAALAYDQAAFATKGSLATLNFPVEVVRESLKKMENVNLHDGGSPVMALKRKHSLRNRPRGKKRSSSSSSSSSNSSSCSSSSSTSSTSRSSSKQSVVKQESGTLVVFEDLGAEYLEQLLMSSC

SEQ ID NO: 99 - DNA, 773 bp, Arabidopsis thaliana
  G1755
acctttttttttctctgctaacgaaaaaagccatcttctttgctactactaatctactattacactgaatcgtttgggttcttcttcttcttcagctgctactttgttcgagtgattgctgacatgccgtcagcgtcggagattgttgacaggaaacggaagtctcgtggaacacgagatgtagctgagattctaaggaaatggagagagtacaatgagcagaccgaggcagattcttgcatcgatggtggtggttcaaaaccaatccgaaaggctcctccaaaacgttcgaggaagggttgtatgaaaggtaaaggtggacctgaaaatgggatttgtgactatacaggagttagacagaggacatggggtaaatgggttgctgagatccgtgagccaggccgaggtgctaagttatggctcggtactttctctagttcatatgaagctgcattggcttatgatgaggcttccaaagctatttacggtcagtctgcccgactcaatcttccactgctgccactgtgtcaggctcggttactgcattttctgatgaatctgaagtttgtgcacgtgaggatacaaatgcaagatctggttttggtcaggtcagactagaggattgtattgatgaatatgttctcctagatagttctagtgtattgttaatcgtagttgactattgtgaggtcttaagttgtagattgaaaatgagatagctcatatggagctttattgaaatgcaagaaagtaaacaaaaaaaaaaaaaaaaa

SEQ ID NO: 100 - protein, 164 aa, Arabidopsis thaliana
  G1755 polypeptide
MPSASEIVDRKRKSRGTRDVAEILRKWREYNEQTEADSCIDGGGSKPIRKAPPKRSRKGCMKGKGGPENGICDYTGVRQRTWGKWVAEIREPGRGAKLWLGTFSSSYEAALAYDEASKAIYGQSARLNLPLLPLCQARLLHFLMNLKFVHVRIQMQDLVLVRSD

SEQ ID NO: 101 - DNA, 768 bp, Arabidopsis thaliana
  G1784
atggctcttgagaaaagcaaaggatgcaaactcctttttgtttgtgatgattttgtagatcgtgcagaggacactctgtttttaaaaacagttgccttggagaagacgtcagtttctgagggagatgaacaagctttcgaattcgaaggatataaggggtttctcgatatttccgagagctgtgatggccttgtctgcttctacgacactacaagagcagtggaagtaatgaatccggccacaacaatgttcatagaactccctctatcgagaatccaacagctttgtatatacaagccaaacccggaggtggagctggagccagttcaagatccaaatcctgttctagacccagtcatgacatgttctcagattggagttgggaaagacagcgttagtggaagttataaactagtatggatgtataatacttctcctgctactcctcctacgtgcgaggttttggatttagatggaaaaaaatggaggttcgtgaatactacttctcttgatcatcatcagatcttgtgcgatcagaggccggtgtttgcaaacggatcactctactggctcacgggagatgaggaaggatatgcaacaacacaaaccaaactcatagttttagatttacacacagagatgtttcaagtcatccaaacaccgccttttattacccgtgatgcctctggtgacaagattggtttatgcaatcttgatggtcgtctctgtatttcagagttgaagaaagattgcaagcaagagttttga

SEQ ID NO: 102 - protein, 255 aa, Arabidopsis thaliana
  G1784 polypeptide
MALEKSKGCKLLFVCDDFVDRAEDTLFLKTVALEKTSVSEGDEQAFEFEGYKGFLDISESCDGLVCFYDTTRAVEVMNPATTMFIELPLSRIQQLCIYKPNPEVELEPVQDPNPVLDPVMTCSQIGVGKDSVSGSYKLVWMYNTSPATPPTCEVLDLDGKKWRFVNTTSLDHHQILCDQRPVFANGSLYWLTGDEEGYATTQTKLIVLDLHTEMFQVIQTPPFITRDASGDKIGLCNLDGRLCISELKKDCKQEF

SEQ ID NO: 103 - DNA, 705 bp, Arabidopsis thaliana
  G1785
atgaaaaaaaattatcaaaagaagaatataaaggtggtgagcacaagcaaatatttgaagaaaagtgacatcgacaaagtaaactggacagaatctgaggacataaaattgaaagagataatggcgcttggacccaaaaacaaatggacaaaggtcgcaaaaaaattcgaaggaagaacaggaaaacaatgcagagagaggtggtataaccatgctcgtcctaacattaagaaaactgcttggagtgaagaagaagatcaaattttgattgaagcacacaaagtacttggtaccaaatgggtcgagatcgcacagcaacttccggggaggagcgataacaatattaagaaccattggaacaccacaaagcgtcgggtgcaaaataaaagaggtggaactgtcaaccctgtcggcaataacatccttgaaaactacataaggtgtatcacaatcaacaacgaagattttcttaagaccgatggatcttatggtgaaccgacaaacattgagagtgatgatgactctaaagatatgttatacggggagatgaatttgagtctagagactataacgacgcagaccaccaaaccattgaccaatgcttctacaacatcaccttatgttcagatgccagaagataattatactatggaggattgtgaatcactggaggacattctagagctgctgcgttggtgggaataa

SEQ ID NO: 104 - protein, 234 aa, Arabidopsis thaliana
  G1785 polypeptide
MKKNYQKKNIKVVSTSKYLKKSDIDKVNWTESEDIKLKEIMALGPKNKWTKVAKKFEGRTGKQCRERWYNHARPNIKKTAWSEEEDQILIEAHKVLGTKWVEIAQQLPGRSDNNIKNHWNTTKRRVQNKRGGTVNPVGNNILENYIRCITINNEDFLKTDGSYGEPTNIESDDDSKDMLYGEMNLSLETITTQTTKPLTNASTTSPYVQMPEDNYTMEDCESLEDILELLRWWE

SEQ ID NO: 105 - DNA, 549 bp, Arabidopsis thaliana
  G1791
atgtacatgcaaaaacaaaaaccttaaaagctttcatggaacgtatagagtcttataacacgaatgagatgaaatacagaggcgtacgaaagcgtccatggggaaaatatgcggcggagattcgcgactcagctagacacggtgctcgtgtttggcttgggacgtttaacacagcggaagacgcggctcgggcttatgatagagcagctttcggcatgagaggccaaagggccattctcaattttcctcacgagtatcaaatgatgaaggacggtccaaatggcagccacgagaatgcagtggcttcctcgtcgtcgggatatagaggaggaggtggtggtgatgatgggagggaagttattgagttcgagtatttggatgatagtttattggaggagcttttagattatggtgagagatctaaccaagacaattgtaacgacgcaaaccgctagatcatcactacttacttacagtgtaatgtttttggagtaaagagtaataatcaatataatatactttagtttaggaaaaaaaaaaaaaaaaaaa

SEQ ID NO: 106 - protein, 139 aa, Arabidopsis thaliana
  G1791 polypeptide
MERIESYNTNEMKYRGVRKRPWGKYAAEIRDSARHGARVWLGTFNTAEDAARAYDRAAFGMRGQRAILNFPHEYQMMKDGPNGSHENAVASSSSGYRGGGGGDDGREVIEFEYLDDSLLEELLDYGERSNQDNCNDANR

SEQ ID NO: 107 - DNA, 977 bp, Arabidopsis thaliana
  G1808
aattcttcccttttccccttctaatttctctcatctctctattagaaaaattattagcaattatgttgtccactgcaccggccttttcattctccgaaccgggtttggttaatcaattctcgggtttccaaaccgggttcactccttgggaatgggattgctctgatctctttttcgtggaccaaatgtctcttgaaccggccatccctagtccttgttatggtgaatccgacactggttccgtcaaaattaattccggttctcatgacatgaaaaccggttctgacgaatcttgtgccggtttcgtcaaaattaatcctcgttgtgacgacgccgacatatcaaacgatctaccgtgctctcaagcagatgaaccggactcggacgacacaaaacaattgacagccatcacaaatttcggttcgggagagaataaccataaccggaaaaaaatgatccaaccggagatgaccgacgagcggaagaggaagaggatggagtcaaaccgggaatcagcgaaacggtcaagaatgcgtaaacaaagtcacattgataacttacgagagcaagtaaaccggttggatttagaaaaccgtgagctcgggaaccgactccggttagttttacaccagcttcaacgagtgaattccgacaataaccggctcgtgacagaacaagagatactccggctaagattgtcggagatgcgtcggattctgatcattagacaacttcaacaacagcaacaatgggaactacataaccggagaatgatcatgactgaacaaaaccaccctcatcttcaatgatagatcaaaatatttaagaagaaaaaatatcgaaaaacttagaacaataaccaaaaaaaaaaagcaaagcaaaaaagaaactctcgctatgtctctctatctctctatgtaaatgaaatgaaggttaggaagagaaaatgatagttttctaattttcctttccacttt

SEQ ID NO: 108 - protein, 248 aa, Arabidopsis thaliana
  G1808 polypeptide
MLSTAPAFSFSEPGLVNQFSGFQTGFTPWEWDCSDLFFVDQMSLEPAIPSPCYGESDTGSVKINSGSHDMKTGSDESCAGFVKINPRCDDADISNDLPCSQADEPDSDDTKQLTAITNFGSGENNHNRKKMIQPEMTDERKRKRMESNRESAKRSRMRKQSHIDNLREQVNRLDLENRELGNRLRLVLHQLQRVNSDNNRLVTEQEILRLRLSEMRRILIIRQLQQQQQWELHNRRMIMTEQNHPHLQ

SEQ ID NO: 109 - DNA, 604 bp, Arabidopsis thaliana
  G1809
ctctctattctcgtctttagcaaaatctcaaaagacaaaaagatattgatgtctctccaacgacccaatgggaactcgagttcgtcttcttcccacaagaagcacaaaactgaggaaagtgatgaggagttgttgatggttcctgacatggaagcagctggatcaacatgtgttctaagcagcagcgccgacgatggagtcaacaatccggagcttgaccagactcaaaatggagtctctacagctaaacgccgccgtggaagaaaccctgttgataaagaatatagaagcctcaagagattattgaggaacagagtatcagcgcaacaagcaagagagaggaagaaagtgtatgtgagtgatttggaatcaagagctaatgagttacagaacaacaatgaccagctcgaagagaagatttctactttgacgaacgagaacacaatgcttcgtaaaatgcttattaacacaaggcctaaaactgatgacaatcactaaatatttaccctttaatccattgttcagtgttgtatgattatctttctttcttttttggttttggtttgtatacactttttgttcgaataacattcactttgagcat

SEQ ID NO: 110 - protein, 149 aa, Arabidopsis thaliana
  G1809 polypeptide
MSLQRPNGNSSSSSSHKKHKTEESDEELLMVPDMEAAGSTCVLSSSADDGVNNPELDQTQNGVSTAKRRRGRNPVDKEYRSLKRLLRNRVSAQQARERKKVYVSDLESRANELQNNNDQLEEKISTLTNENTMLRKMLINTRPKTDDNH

SEQ ID NO: 111 - DNA, 702 bp, Arabidopsis thaliana
  G1815
atggatttttcatgtttccaagaatacccttttgagtttcattgcagaggaacaacatttaatgggtttagagaaaacaatgcagtgtctgaaacagtagaagagttctgtaataaaagaaggatgcagaagaagagtgatgatttgaagactaagaagaagaagaaacagagtgtttctagggtttgtagtagaggacattggaggatctctgaagatactcagcttatggagcttgtttcggtttacggtcctcaaaactggaaccacattgcagagagtatgcaaggaagaacaggaaagagctgcagattgaggtggtttaaccagttagatccgaggattaacaagagagctttcagtgatgaagaagaagagagactacttgctgctcatagagcttttggtaacaaatgggctatgattgctaagcttttcaatggaagaacagataatgccttgaagaatcattggcatgttctcatggcaaggaagatgagacagcaatcaagttcttacgtccaaagattcaatggttctgctcatgaatctaacacagatcacaaaatcttcaatctttctcctggtttgtctcttcttaccttacacatatgcattgagtttaactctgttattgtaatgagatactttcgatatttatcactcaggaacaatgaacttatggtttggtctcaaaagtag

SEQ ID NO: 112 - protein, 233 aa, Arabidopsis thaliana
  G1815 polypeptide
MDFSCFQEYPFEFHCRGTTFNGFRENNAVSETVEEFCNKRRMQKKSDDLKTKKKKKQSVSRVCSRGHWRISEDTQLMELVSVYGPQNWNHIAESMQGRTGKSCRLRWFNQLDPRINKRAFSDEEEERLLAAHRAFGNKWAMIAKLFNGRTDNALKNHWHVLMARKMRQQSSSYVQRFNGSAHESNTDHKIFNLSPGLSLLTLHICIEFNSVIVMRYFRYLSLRNNELMVWSQK

SEQ ID NO: 113 - DNA, 952 bp, Arabidopsis thaliana
  G1865
aagaagaggacatgaagcacagagattctgcagactgcaggtgaccaatggacactttatcaataaaaacatacctactactctcttacactttcaattttccaatacaaatcccaatctttaatctctctttcttcttcatctctctttctctttctctcttcatggctacaaggattccattcacagaatcacaatgggaagaacttgaaaaccaagctcttgtgttcaagtacttagctgcaaatatgcctgttccacctcatcttctcttcctcatcaaaagaccctttctcttctcttcttcttcttcttcatcttcttcttcaagcttcttctctcccactctttctccacactttgggtggaatgtgtatgagatgggaatgggaagaaagatagatgcagagccaggaagatgtagaagaactgatggcaagaaatggagatgctctaaagaagcttaccctgactctaagtactgtgagagacatatgcatagaggcaagaaccgttcttcctcaagaaagcctcctcctactcaattcactccaaatctctttctcgactcttcttccagaagaagaagaagtggatacatggatgatttcttctccatagaaccttccgggtcaatcaaaagctgctctggctcagcaatggaagataatgatgatggctcatgtagaggcatcaacaacgaggagaagcagccggatcgacattgcttcatccttggtactgacttgaggacacgtgagaggccattgatgttagaggagaagctgaaacaaagagatcatgataatgaagaagagcaaggaagcaagaggttttataggtttcttgatgaatggccttcttctaaatcttctgtttctacttcactcttcatttgatcatcttttgttcttataaccttgtatttcttgttaagatggtaatgcaaatt

SEQ ID NO: 114 - protein, 283 aa, Arabidopsis thaliana
  G1865 polypeptide
MDTLSIKTYLLLSYTFNFPIQIPIFNLSFFFISLSLSLFMATRIPFTESQWEELENQALVFKYLAANMPVPPHLLFLIKRPFLFSSSSSSSSSSSFFSPTLSPHFGWNVYEMGMGRKIDAEPGRCRRTDGKKWRCSKEAYPDSKYCERHMHRGKNRSSSRKPPPTQFTPNLFLDSSSRRRRSGYMDDFFSIEPSGSIKSCSGSAMEDNDDGSCRGINNEEKQPDRHCFILGTDLRTRERPLMLEEKLKQRDHDNEEEQGSKRFYRFLDEWPSSKSSVSTSLFI

SEQ ID NO: 115 - DNA, 741 bp, Arabidopsis thaliana
  G1884
atgatgacgtcatcccatcagagcaacaccaccggctttaaaccgcggcggatcaagacgacggcgaagccaccacgtcagatcaataacaaagaaccatctccggcgacgcagccggtgctcaagtgtccgagatgtgattcagtcaacaccaaattctgctactacaacaactacagcttgtctcagccacgtcactactgcaagaactgtcgtcgttactggacacgtggcggcgccctccgtaacgttcccatcggtggctccactcgaaacaagaacaagccttgcagcctccaagtcatctcttctcctcctttgttctcgaacgggacgtcatcggcgtctcgtgagcttgtaagaaaccatccatcgacggcaatgatgatgatgagttctggtggattctccggctatatgtttccgttggatcctaacttcaaccttgcctcgtcttctatcgagtctttgagttcttttaaccaagatttgcaccagaagcttcagcaacaaagactcgtcacttccatgtttctccaagattctcttccggttaacgagaaaacggttatgtttcagaacgtagagttgattcctccttcgacggtgacgacggattgggttttcgataggttcgccactggaggaggtgcaacaagtggcaatcatgaagataatgatgatggggagggtaatttgggaaattggttccataatgctaataataatgctctgctctaa

SEQ ID NO: 116 - protein, 246 aa, Arabidopsis thaliana
  G1884 polypeptide
MMTSSHQSNTTGFKPRRIKTTAKPPRQINNKEPSPATQPVLKCPRCDSVNTKFCYYNNYSLSQPRHYCKNCRRYWTRGGALRNVPIGGSTRNKNKPCSLQVISSPPLFSNGTSSASRELVRNHPSTAMMMMSSGGFSGYMFPLDPNFNLASSSIESLSSFNQDLHQKLQQQRLVTSMFLQDSLPVNEKTVMFQNVELIPPSTVTTDWVFDRFATGGGATSGNHEDNDDGEGNLGNWFHNANNNALL

SEQ ID NO: 117 - DNA, 1503 bp, Arabidopsis thaliana
  G1895
cgtcgaccacataacacaaatctaatctcatactccatcttcttttctgtcttatgtcttcaaagattggtatgtctcaagttagagatactccggttaaattgtttggctggacaattacaccggtttctcatgatccatactcttcttcgtcccatgttcttcctgattcttcctcgtcttcctcgtcttcttctctatcacttcgaccacacatggtatgtttcatggtcttacctttatttgttaagaaatgctaaagatttaatattttctctagtccttgtatcagtttgaaactagttcatgatgttaatcctaatccaagttccttcaatttttttcagatgaataaccaatctgttactgacaatacaagtcttaagctgtcatctaatcttaacaacgagtcaaaagaaacatctgagaacagtgatgaccaacacagcgagatcacaacaattacatcggaagaagagaaaacaactgaactgaagaaaccagacaagattcttccatgtccgagatgcaacagcgcagacaccaaattctgttactacaacaactacaacgttaaccagccacgtcacttctgtagaaaatgccagaggtattggaccgctggtggatccatgaggatcgtcccggttggctcaggccgtcgcaagaacaagggatgggtttcttcagaccagtacctgcacatcacttccgaggatactgacaattacaatagctcctcaacaaagattctaagcttcgagtcttcggactctttggtaactgagaggcctaagcatcaatcaaacgaagtgaagataaacgctgaacctgtttcacaagaacccaacaacttccaagggttacttcctccccaagcatcccctgtttcgcctccttggccttaccaataccctccaaaccctagtttctaccacatgcccgtctactggggctgcgcgataccggtttggtctaccctcgacacttctacatgtcttgggaaaaggacaagagacgaaacttctcatgaaactgttaaagagagtaaaaatgcttttgagagaacaagcatgcttttggaatctcagagcatcaaaaatgaaacaagtatggctacaaataaccatgtgtggtatccagtaccgatgacccgcgagaagacacaagaattcagctttttcagtaatggagctgaaacaaagagcagcaacaacagattcgtccctgaaacgtatcttaacctgcaagcaaaccctgcagccatggcaagatctatgaacttcagagagagcatataacgttaaaggagaaaagaaactttgtagatacctttttttgtgtgatgaattaacttttaatatctatcttatttatataccacaatccccattttgtagattatccaaacagatggaaatgctgaagtgtaatgtcttttttggtaaatgtggttcgaaaatattgtttactccattatttgtattctgtagtactagtgtc

SEQ ID NO: 118 - protein, 317 aa, Arabidopsis thaliana
  G1895 polypeptide
MNNQSVTDNTSLKLSSNLNNESKETSENSDDQHSEITTITSEEEKTTELKKPDKILPCPRCNSADTKFCYYNNYNVNQPRHFCRKCQRYWTAGGSMRIVPVGSGRRKNKGWVSSDQYLHITSEDTDNYNSSSTKILSFESSDSLVTERPKHQSNEVKINAEPVSQEPNNFQGLLPPQASPVSPPWPYQYPPNPSFYHMPVYWGCAIPVWSTLDTSTCLGKRTRDETSHETVKESKNAFERTSMLLESQSIKNETSMATNNHVWYPVPMTREKTQEFSFFSNGAETKSSNNRFVPETYLNLQANPAAMARSMNFRESI

SEQ ID NO: 119 - DNA, 678 bp, Arabidopsis thaliana
  G1897
atgccttctgaattcagtgaatctcgtcgggttcctaagattccccacggccaaggaggatctgttgcgattccgacggatcaacaagagcagctttcttgtcctcgctgtgaatcaaccaacaccaagttctgttactacaacaactacaacttctcacaacctcgtcatttctgcaagtcttgtcgccgttactggactcatggaggtactctccgtgacattcccgtcggtggtgtttcccgtaaaagctcaaaacgttcccggacttattcctctgccgctaccacctccgttgtcggaagccggaactttcccttacaagctacgcctgttcttttccctcagtcgtcttccaacggcggtatcacgacggcgaagggaagtgcttcgtcgttctatggcggtttcagctctttgatcaactacaacgccgccgtgagcagaaatgggcctggtggcgggtttaatgggccagatgcttttggtcttgggcttggtcacgggtcgtattatgaggacgtcagatatgggcaaggaataacggtctggccgttttcaagtggcgctactgatgctgcaactactacaagccacattgctcaaatacccgccacgtggcagtttgaaggtcaagagagcaaagtcgggttcgtgtctggagactacgtagcgtga

SEQ ID NO: 120 - protein, 225 aa, Arabidopsis thaliana
  G1897 polypeptide
MPSEFSESRRVPKIPHGQGGSVAIPTDQQEQLSCPRCESTNTKFCYYNNYNFSQPRHFCKSCRRYWTHGGTLRDIPVGGVSRKSSKRSRTYSSAATTSVVGSRNFPLQATPVLFPQSSSNGGITTAKGSASSFYGGFSSLINYNAAVSRNGPGGGFNGPDAFGLGLGHGSYYEDVRYGQGITVWPFSSGATDAATTTSHIAQIPATWQFEGQESKVGFVSGDYVA

SEQ ID NO: 121 - DNA, 1200 bp, Arabidopsis thaliana
  G1903
atgtctaaatctagagatacggagataaagttgtttgggaggacaatcacatctcttttagatgtgaattgttatgatccgtcgtcgttgtcccctgttcacgatgtttcttctgatccaagcaaggaggattcgtcttcttcttcatcttcttgttctccaactattggaccaatcagggttccggttaaaaaaagtgagcaagagagtaacaaattcaaagatccatatatattatccgatctaaacgaaccaccaaaagcagtatctgagatttcatcaccaagaagttccaagaacaactgtgatcaacagagcgagatcacaacaacaactaccacaagtactacatcaggagagaaatcaacggctctcaagaaaccggacaagcttattccatgtcctagatgtgaaagcgcaaacaccaaattctgttattacaacaactacaacgtgaaccagccacgttacttctgcaggaactgtcagaggtattggacagctggtggatctatgaggaacgttcctgttggctcaggtcgtcgcaagaacaaaggatggccttcttcaaaccattacttgcaagtcacttctgaggattgtgataataataactcggggacgatccttagtttcggttcttcggagtcttcggttacagagactggtaagcatcagtcaggtgatacagcaaagataagtgctgattcagtttctcaagaaaataaaagctaccaagggtttcttcctccgcaagtaatgttacctaataattcttctccttggccttaccaatggagtccaacgggtcctaacgctagtttctaccctgtccccttctactggggatgcacggttccgatataccctacctcagagacttcatcatgtttaggaaaacggtcaagagatcaaactgaaggaagaatcaatgatactaatacaacaataactactacaagagcaagattggtctcagaatctcttagaatgaatatcgaagctagtaagagcgctgtgtggtctaagttaccgacaaaacccgagaaaaaaacgcaaggattcagtttgttcaatggatttgacacaaagggaaacagcaacagaagtagcttggtctccgaaacttctcacagtctacaagcaaaccctgcagcgatgtctagagctatgaacttcagggagagcatgcaacaataa

SEQ ID NO: 122 - protein, 399 aa, Arabidopsis thaliana
  G1903 polypeptide
MSKSRDTEIKLFGRTITSLLDVNCYDPSSLSPVHDVSSDPSKEDSSSSSSSCSPTIGPIRVPVKKSEQESNKFKDPYILSDLNEPPKAVSEISSPRSSKNNCDQQSEITTTTTTSTTSGEKSTALKKPDKLIPCPRCESANTKFCYYNNYNVNQPRYFCRNCQRYWTAGGSMRNVPVGSGRRKNKGWPSSNHYLQVTSEDCDNNNSGTILSFGSSESSVTETGKHQSGDTAKISADSVSQENKSYQGFLPPQVMLPNNSSPWPYQWSPTGPNASFYPVPFYWGCTVPIYPTSETSSCLGKRSRDQTEGRINDTNTTITTTRARLVSESLRMNIEASKSAVWSKLPTKPEKKTQGFSLFNGFDTKGNSNRSSLVSETSHSLQANPAAMSRAMNFRESMQQ

SEQ ID NO: 123 - DNA, 828 bp, Arabidopsis thaliana
  G1909
atgggtggatcgatggcggagagagcaaggcaggccaacattcctccactagcgggacccctaaagtgtcctcgatgcgactccagcaacactaagttctgttactacaacaactataacctcactcagcctcgtcacttctgcaaaggttgccgtcgctactggacacaagggggcgccctgagaaacgtccctgtaggtggaggctgccggaggaataacaagaagggcaaaaatggaaatttaaaatcttcttcttcttcgtccaaacagtcttcctcggtcaacgctcaaagtcctagctcaggacagctaaggacaaatcatcagttccctttttcaccaactctttacaatctcactcaactcggaggtattggtttgaacttagccgctactaatggcaacaaccaagctcaccagatcggttccagtttgatgatgagcgatctagggtttctccatggacgaaatacttcaactccgatgacgggaaacattcatgaaaacaacaacaataataacaatgaaaacaacctaatggcatccgttggatctttgagcccctttgctctcttcgatccaacgacggggctatacgctttccagaacgacggtaatatcgggaacaacgttgggatatctggttcttctacttccatggttgattctagggtttatcagacgcctccggtgaagatggaagaacaacctaatttggctaacttgtctagaccggtctccggtttgacgtctcctgggaatcaaacaaatcagtacttttggcctggttcggatttctcgggtccttctaatgatctcttgtga

SEQ ID NO: 124 - protein, 275 aa, Arabidopsis thaliana
  G1909 polypeptide
MGGSMAERARQANIPPLAGPLKCPRCDSSNTKFCYYNNYNLTQPRHFCKGCRRYWTQGGALRNVPVGGGCRRNNKKGKNGNLKSSSSSSKQSSSVNAQSPSSGQLRTNHQFPFSPTLYNLTQLGGIGLNLAATNGNNQAHQIGSSLMMSDLGFLHGRNTSTPMTGNIHENNNNNNNENNLMASVGSLSPFALFDPTTGLYAFQNDGNIGNNVGISGSSTSMVDSRVYQTPPVKMEEQPNLANLSRPVSGLTSPGNQTNQYFWPGSDFSGPSNDLL

SEQ ID NO: 125 - DNA, 997 bp, Arabidopsis thaliana
  G1935
cttaaatatacaattttgcattcgatcaatttctctcgtgccaactaataatagattgtgttttgattattttgcagtgaccatcggatatgggtcgggttaaattggagttaaagcgtatagagaagagcacgaaccgacaaattacgttctcaaaacgtaaaaaaggtttaataaaaaaggcttatgaattgtcaacactttgtgacatcgatcttgccctcctcatgttctctccctctgatcgactatgtctcttttccggtcaaacaaggatcgaggacgttttggcgaggtacatcaatcttcctgatcaagaaagagaaaacgccatagttttccctgatcagagcaagcgccaaggtatccaaaacaaagagtatttgttaaggactttggaaaaactcaaaattgaggatgacatggctctccaaatcaacgaacctcgtccagaagccaccaactccaatgtcgaggaacttgagcaagaagtttgtagattacaacaacagcttcagatatcagaggaagaactcaggaaattcgaaccagatccaatgaggctaacatcaatggaggagattgaagcatgtgaagctaacctcatcaatacgttgacacgtgtcgtccagagaagggaacatttgttgagaaagtcctgcgaagcacaaagtaaccaacaaagcatggacgggatccttctaaatgacatcgtcgaggattggggacctgagcccgagcccaaacaagcccatatgatagctaattcggcccatcattcaaatcagccaagctatgatttactcttacgcaggagtaattcgagttcgaaccaaaatccaaaatgatattaggtgaatcgcaaggcgtcgtcgagccctgatggcaagagaatgcatgttataagacaaaaataaacgagatatctcacaaatgggtatgtacctaagcttctacgacttctctttcaaattatggtttttgtgtacaatgtttt

SEQ ID NO: 126 - protein, 252 aa, Arabidopsis thaliana
  G1935 polypeptide
MGRVKLELKRIEKSTNRQITFSKRKKGLIKKAYELSTLCDIDLALLMFSPSDRLCLFSGQTRIEDVLARYINLPDQERENAIVFPDQSKRQGIQNKEYLLRTLEKLKIEDDMALQINEPRPEATNSNVEELEQEVCRLQQQLQISEEELRKFEPDPMRLTSMEEIEACEANLINTLTRVVQRREHLLRKSCEAQSNQQSMDGILLNDIVEDWGPEPEPKQAHMIANSAHHSNQPSYDLLLRRSNSSSNQNPK

SEQ ID NO: 127 - DNA, 883 bp, Arabidopsis thaliana
  G1950
ctgaattcgaactttggaagaagaagaagctttgatcaatcatggaaattgcaaccgatacagcaaagcagatgagagacgaagagttgttcaaagcagcggaatggggagattcatcgttgttcatgtcattatctgaagaacagctctctaaatctctcaatttcagaaacgaagatggtcgctctctcctccatgtcgctgcttccttcggccattctcaaatagtgaagttgttatcaagttcagatgaagcaaagactgtaatcaatagcaaggatgatgaaggatgggctcctttgcattccgctgctagcatcggtaatgctgagctcgttgaggtgcttttgaccagaggtgctgatgtcaatgccaaaaataacggtggtcgcactgctcttcactatgctgctagcaaaggccggttggagattgctcagcttttattaacacacggtgcaaagattaacatcacagacaaggttggttgcactccgcttcacagggcagcaagcgtgggaaagttagaagtttgtgaatttcttattgaagaaggagcagagatcgatgctacggataaaatgggtcaaactgcactcatgcattcagttatctgcgatgacaaacaggttgcgttcctgcttataagacatggtgcagatgtggatgtagaagacaaggaaggctacactgttctaggccgagctaccaatgaattccgacctgcacttatcgatgctgctaaggccatgcttgaaggataaaatgactctggattactttaaaacttactaactctgagagttgtttagttacttaaaaggatttttctttactgtatcatgtttgcaaaatgtttctgccttatcaattcatgttctgt

SEQ ID NO: 128 - protein, 240 aa, Arabidopsis thaliana
  G1950 polypeptide
MEIATDTAKQMRDEELFKAAEWGDSSLFMSLSEEQLSKSLNFRNEDGRSLLHVAASFGHSQIVKLLSSSDEAKTVINSKDDEGWAPLHSAASIGNAELVEVLLTRGADVNAKNNGGRTALHYAASKGRLEIAQLLLTHGAKINITDKVGCTPLHRAASVGKLEVCEFLIEEGAEIDATDKMGQTALMHSVICDDKQVAFLLIRHGADVDVEDKEGYTVLGRATNEFRPALIDAAKAMLEG

SEQ ID NO: 129 - DNA, 1750 bp, Arabidopsis thaliana
  G1954
atttatgacttctcaatacaaaaagctcccctcacttttttaagttttgtcttctctaatccgtcttcttctactatcttgcatgtcttgcgtcttttatatacatctctcgtaaaccctagcaaatcatacaaggtcaagaagcttgaccttcattagacttaagcagtttataatcaactaccacgaatagcaatggataaagattactcggcaccaaacttcttaggtgaatcctcaggcggtaacgatgataacagctctggtatgatagactatatgttcaatagaaaccttcaacaacaacaaaagcaatcgatgccacaacagcagcaacatcaactctctccttccggatttggagcaacaccctttgataaaatgaacttctctgatgtgatgcagtttgcggacttcggttcgaaacttgcgttgaaccagaccagaaaccaagacgatcaagaaaccgggattgaccccgtttatttcttgaagttccctgtcttgaacgacaaaatagaggaccataaccaaacccaacatctcatgccttctcatcagacgtctcaagaaggaggtgagtgtggaggaaacataggcaatgtgtttcttgaagaaaaagaagatcaagacgatgacaacgacaacaactccgtgcaactacgttttattggaggagaagaagaagatagggagaacaagaatgttacgaaaaaggaggtgaagagcaagaggaagagagctagaacgagcaagaccagcgaagaagtggaaagccaacggatgactcatatcgcggtcgaaagaaaccgtaggaagcaaatgaatgagcatcttcgtgtccttagatctctcatgcctggctcctacgttcaaaggggagaccaagcgtcaatcataggaggagcaatagagtttgtgagagagctcgagcaactcctacaatgtcttgaatcacagaagcgtcgaagaatcttaggagaaaccggtagggacatgacaacgacaacgacttcttcttcttctcccataactacggtagcgaaccaagcacaaccgctcattattacgggaaatgtaaccgagctagagggcggaggagggcttcgggaggagactgcggagaacaagtcgtgcttggctgacgtggaggtgaagctgctagggtttgacgccatgatcaagatactttcaagaagaaggccgggacagctgattaagactatagctgctttggaggatcttcatctctctattcttcacactaacatcactaccatggaacaaaccgtcctctactcctttaatgtcaagataacaagtgaaacgaggtttacggcagaagacatagcaagttccatccaacagatatttagtttcattcatgcaaataccaacatatctggaagctctaacctgggaaatattgtgtttacttgaaaatcatcacacggcgacaactttgtacactggtgaagattacagtacgtaataatctctacatattgggttttattctccaagcatttggaagagtgtttaagttaaagggagtgcttactttatttttttggggcttttttcatgcaatttaaattttagtgatgattgtgtcgcttgtaatgttagaactcgttgttgtgatttctgctgctttgatttgtaggttttgaacaagcggtttagaatgctaaaccacttatttacttgaaataacttttttcacaaaaaaaaaaaaaaaagaaaaaaa

SEQ ID NO: 130 - protein, 414 aa, Arabidopsis thaliana
  G1954 polypeptide
MDKDYSAPNFLGESSGGNDDNSSGMIDYMFNRNLQQQQKQSMPQQQQHQLSPSGFGATPFDKMNFSDVMQFADFGSKLALNQTRNQDDQETGIDPVYFLKFPVLNDKIEDHNQTQHLMPSHQTSQEGGECGGNIGNVFLEEKEDQDDDNDNNSVQLRFIGGEEEDRENKNVTKKEVKSKRKRARTSKTSEEVESQRMTHIAVERNRRKQMNEHLRVLRSLMPGSYVQRGDQASIIGGAIEFVRELEQLLQCLESQKRRRILGETGRDMTTTTTSSSSPITTVANQAQPLIITGNVTELEGGGGLREETAENKSCLADVEVKLLGFDAMIKILSRRRPGQLIKTIAALEDLHLSILHTNITTMEQTVLYSFNVKITSETRFTAEDIASSIQQIFSFIHANTNISGSSNLGNIVFT

SEQ ID NO: 131 - DNA, 1444 bp, Arabidopsis thaliana
  G1958
gtaccgtcgaccgattatccccaagaggagaatcctcataatcattttctccgattcgattcgtcttccttggtcctggattgcttcatgaatttctaggacaacaatggaggctcgtccagttcatagatcaggttcgagagacctcacacgcacttcttcaatcccatctacacaaaaaccttcaccagtagaagatagtttcatgagatcagataacaacagtcagttaatgtctagaccattaggacaaacctaccatttactttcatctagtaacggtggagctgttggacatatatgttcttcttcatcatctggttttgcaaccaatctccattactcaactatggtatctcatgagaaacaacaacactacacaggaagcagcagtaataatgctgtgcagacaccaagcaacaacgatagtgcttggtgtcatgattcattgccaggagggtttcttgacttccatgaaaccaacccggcgattcaaaacaactgtcagattgaggatggtggcattgcggctgcttttgatgacattcaaaaacgaagtgattggcatgaatgggctgaccatttgatcactgatgatgatcctttgatgtctactaactggaatgatctcttgcttgaaacaaattccaattcagattcaaaggaccagaagacactgcaaattccgcaacctcagattgttcagcagcaaccttctccgtctgtggaattgcgacctgttagcacaacatcttcaaacagcaataacggaacgggcaaggcacgaatgcgttggacgccagagcttcacgaggcttttgttgaggctgtcaacagtcttggcggtagtgaaagagctactcctaaaggggtactgaagattatgaaagttgaaggcttgactatatatcatgttaaaagccatttacagaaatataggacagctagatatcggccagaaccatcagaaactggttcgccagaaaggaagttgacaccgcttgaacatataacatctcttgatttgaaaggtgggataggtattacagaggctctacgacttcagatggaagtacagaagcaactccatgagcagctcgagattcaaagaaacctgcaactccgaatagaagaacaaggcaagtacctgcaaatgatgttcgagaagcaaaactctggtcttaccaaagggacagcctcaacatcagattccgcagccaaatctgaacaagaagacaagaagactgctgattcgaaggaggttccagaagaagaaaccaggaaatgtgaggaactagaatctccacagccaaagcgtcccaaaatcgataattgaaagtattggtcttttgctggataatctcggagtttcagagttaacagtgatagagagaacgagctcttatcttgaggttcttcaggacttctctcgcggccgctctag

SEQ ID NO: 132 - protein, 409 aa, Arabidopsis thaliana
  G1958 polypeptide
MEARPVHRSGSRDLTRTSSIPSTQKPSPVEDSFMRSDNNSQLMSRPLGQTYHLLSSSNGGAVGHICSSSSSGFATNLHYSTMVSHEKQQHYTGSSSNNAVQTPSNNDSAWCHDSLPGGFLDFHETNPAIQNNCQIEDGGIAAAFDDIQKRSDWHEWADHLITDDDPLMSTNWNDLLLETNSNSDSKDQKTLQIPQPQIVQQQPSPSVELRPVSTTSSNSNNGTGKARMRWTPELHEAFVEAVNSLGGSERATPKGVLKIMKVEGLTIYHVKSHLQKYRTARYRPEPSETGSPERKLTPLEHITSLDLKGGIGITEALRLQMEVQKQLHEQLEIQRNLQLRIEEQGKYLQMMFEKQNSGLTKGTASTSDSAAKSEQEDKKTADSKEVPEEETRKCEELESPQPKRPKIDN

SEQ ID NO: 133 - DNA, 879 bp, Arabidopsis thaliana
  G2052
atgggaagttcatgtttacctccagggttccggtttcatcctacggatgaagaactcatcgaatattacttgaaaagaaaagtcgaaggtctcgagattgagcttgaagtcattcccgtcatcgatctttatagtttcgatccttgggagttaccagacaagtcgtttctcccaaaccgggacatggaatggtacttcttctgctcaagggacaaaaaatatcctaatggttttcgtacaaatcgaggaacaaaggctggttattggaaagcaaccggaaaagatcgaaaaattacttctcgttcatcttctataattggttatagaaaaactctagttttctacaaaggccgtgccccgttaggcgatagaagcaattggatcatgcatgaatatcgactatgcgatgatgatacatcacaaggatcacaaaatttaaagggagcttttgtgttatgtcgtgttgctatgaagaatgagatcaaaactaatacgaaaatccgaaaaattccaagcgagcaaacaatcggatcaggagaaagctcgggtttatcaagccgagtaacgtctcctagtcgcgatgaaacaatgccgtttcactcatttgccaatcctgtatctactgaaactgattcttccaacatttggatttcacctgaattcatcctcgattcttcaaaggactatcctcaaatccaagatgtcgcatctcagtgcttccaacaagactttgattttccgatcatcggtaaccaaaacatggagtttccagcgagtacaagcttagatcagaacatggatgagtttatgcaaaacggttattggacaaattatggatacgatcaaaccggtttattcggttactcagatttctcctag

SEQ ID NO: 134 - protein, 292 aa, Arabidopsis thaliana
  G2052 polypeptide
MGSSCLPPGFRFHPTDEELIEYYLKRKVEGLEIELEVIPVIDLYSFDPWELPDKSFLPNRDMEWYFFCSRDKKYPNGFRTNRGTKAGYWKATGKDRKITSRSSSIIGYRKTLVFYKGRAPLGDRSNWIMHEYRLCDDDTSQGSQNLKGAFVLCRVAMKNEIKTNTKIRKIPSEQTIGSGESSGLSSRVTSPSRDETMPFHSFANPVSTETDSSNIWISPEFILDSSKDYPQIQDVASQCFQQDFDFPIIGNQNMEFPASTSLDQNMDEFMQNGYWTNYGYDQTGLFGYSDFS

SEQ ID NO: 135 - DNA, 1099 bp, Arabidopsis thaliana
  G2072
tcgacccacgcgtccgcccacgcgtccggatcttttcacagaagaccaaccagcttggctcgatgagctcctaagtgagccagcatcacctaagattaacaaaggtcatagacgttcagctagtgacacagctgcttacttgaactcagctttaatgccttcgaaggaaaatcatgttgctggttcgtcttggcagttccagaactatgatttgtggcagtccaactcttatgaacaacacaataaattaggatgggatttctctacagcaaatggaactaatatccaaagaaatatgtcatgcggagctttaaatatgtcgtcgaaacccattgagaaacatgtaagcaaaatgaaagaaggaacttctacaaaaccagatggtcctagatcaaagactgactcaaaacgtatcaaacatcaaaatgctcatcgagcgcgtttgagaaggcttgagtacatatcagaccttgaaaggaccatccaagtgctacaagttgaaggatgtgaaatgtcatctgccattcactacttggatcagcagttactcatgcttagcatggaaaatagagctttaaaacaacgtatggatagtttagcagaaatccaaaagcttaaacatgtggagcagcaattgcttgagagagagataggaaacctacagtttcgacgacaccaacaacaaccacagcaaaaccaaaaacaagtccaagcaatacaaaatcgatacaccaaatatcaaccacctgttacacaagaacccgatgcccaatttgcagccttggcaatatgatttaggaaatatggatacattgttcagattaagctgagctcctcttgctctaccttaatgtccatacaacataggtgaacttgatgtttgtagccttgaatgaaaacctaaaaaagcatcgttatgtaaatcaaaatgtggttgcccatatcctcctctattgcatttctctctatttatggcatggtagagaatctcttgtcaagaaacttcatgttatgtaataacttgtaatccttcttatttcatctattatatatatgaataagtaatttttttgccaaaaaaaaaaaaaaaaaaaaaaaa

SEQ ID NO: 136 - protein, 212 aa, Arabidopsis thaliana
  G2072 polypeptide
MPSKENHVAGSSWQFQNYDLWQSNSYEQHNKLGWDFSTANGTNIQRNMSCGALNMSSKPIEKHVSKMKEGTSTKPDGPRSKTDSKRIKHQNAHRARLRRLEYISDLERTIQVLQVEGCEMSSAIHYLDQQLLMLSMENRALKQRMDSLAEIQKLKHVEQQLLEREIGNLQFRRHQQQPQQNQKQVQAIQNRYTKYQPPVTQEPDAQFAALAI

SEQ ID NO: 137 - DNA, 722 bp, Arabidopsis thaliana
  G2108
gagagagaaacattgatctctgaatattgtgaacatgttgaaatcaagtaacaagagaaaaagcaaagaagagaagaagttacaagaagggaagtaccttggagtgaggagacgtccatggggaagatatgcagctgaaatcagaaacccttttactaaagaaagacattggcttggaacgtttgatacagccgaagaagctgcttttgcatatgacgttgctgctcgatccatcagcggctctctagctacaacaaacttcttctacactgaaaacacctctttagaaagacatccacaacagtctttggagcctcatatgacttggggatcttctagtctctgtcttcttcaagatcagccttttgaaaacaaccattttgttgctgatcctatctcttcttctttttctcaaaaacaagagtcttctaccaatctcactaacactttctcacattgttataatgatggtgatcatgttggccaaagcaaagagatttctttacctaatgatatgtcaaacagtttattcggtcatcaggacaaagtcggtgaacatgacaatgcagaccatatgaagtttggctcagttctcagcgacgaacctctctgctttgagtatgactacattgggaattatcttcagagttttctcaaagatgtcaacgacgatgctccacagtttcttatgtgagcttgtattaccgatccttcaatttatg

SEQ ID NO: 138 - protein, 219 aa, Arabidopsis thaliana
  G2108 polypeptide
MLKSSNKRKSKEEKKLQEGKYLGVRRRPWGRYAAEIRNPFTKERHWLGTFDTAEEAAFAYDVAARSISGSLATTNFFYTENTSLERHPQQSLEPHMTWGSSSLCLLQDQPFENNHFVADPISSSFSQKQESSTNLTNTFSHCYNDGDHVGQSKEISLPNDMSNSLFGHQDKVGEHDNADHMKFGSVLSDEPLCFEYDYIGNYLQSFLKDVNDDAPQFLM

SEQ ID NO: 139 - DNA, 1148 bp, Arabidopsis thaliana
  G2116
ttcatctccatcattatctccattgacattgttctcaattgcgaataataatcataattattcacacaaccaaagcattcatctctcagattctcttaaaaaaatggagaaatcagatcctccaccagtcccaaagcccggcgccactattatcccctcctccgatccaattcctaatgccgatccgattccatcttcttccttccaccgccgatctcgctccgacgatatgtccatgttcatgttcatggatcccctctcctccgccgcaccaccttcctccgacgaccttccctccgacgacgatctcttctcttctttcatcgatgtcgatagcctcacctctaatcccaatccctttcaaaatccttccctctcctccaactccgtttccggcgctgctaatcctcctcctcctccttcctctcgtcctcgccaccgtcacagcaattccgttgacgctggatgcgccatgtatgccggtgatatcatggacgctaagaaagctatgcctcctgaaaaactctctgagctttggaacatcgatcccaaacgcgccaaaaggattctagcgaatcgacaatctgcagctcgatccaaagagagaaaagctcgatacattcaagaacttgagcgcaaagttcaatctcttcaaaccgaagctaccactctctctgctcagcttactctctaccagagagacacaaatggactagcaaacgaaaacacagagctgaaacttaggttgcaagcaatggaacaacaagctcagcttcgtaatgctttaaacgaagcgttgaggaaagaagttgaaaggatgaagatggagacaggagaaatctctggtaattcagattcgtttgatatgggaatgcagcagattcagtattcttcctcaactttcatggctattccaccatatcatggctcaatgaacctccatgatatgcagatgcattctagtttcaatcctatggagatgtccaattctcaaagcgtgtcggactttctacagaacggccgaatgcaagggctggagattagtagcaatagctcaagcttagtcaaatctgaaggaccttctctctctgctagtgagagtagctctgcctattgacgacaagattatgatgaggctcatttttctg

SEQ ID NO: 140 - protein, 337 aa, Arabidopsis thaliana
  G2116 polypeptide
MEKSDPPPVPKPGATIIPSSDPIPNADPIPSSSFHRRSRSDDMSMFMFMDPLSSAAPPSSDDLPSDDDLFSSFIDVDSLTSNPNPFQNPSLSSNSVSGAANPPPPPSSRPRHRHSNSVDAGCAMYAGDIMDAKKAMPPEKLSELWNIDPKRAKRILANRQSAARSKERKARYIQELERKVQSLQTEATTLSAQLTLYQRDTNGLANENTELKLRLQAMEQQAQLRNALNEALRKEVERMKMETGEISGNSDSFDMGMQQIQYSSSTFMAIPPYHGSMNLHDMQMHSSFNPMEMSNSQSVSDFLQNGRMQGLEISSNSSSLVKSEGPSLSASESSSAY

SEQ ID NO: 141 - DNA, 1064 bp, Arabidopsis thaliana
  G2132
attctgttacttagtaccggagtttagtcggagagagaacaatgatcagtttcagagaagagaacatcgatctcaacttgattaaaacaattagtgtaatctgtaatgatccagacgccaccgattcctctagcgacgatgaatctatctccggcaataatcctcgccgtcagatcaaaccaaaaccaccgaaacgttacgtctcaaagatctgtgtcccgacgctgatcaaaaggtatgagaacgtttcgaattctacagggaataaagcagccggaaaccggaaaacgtcgtcgggtttcaaaggcgtacgacggaggccgtgggggaaatttgcggcggagataagaaatccgtttgagaagaagagaaagtggcttggaacgtttcctactgaagaagaagcagcagaagcttaccaaaagagtaaaagagagtttgatgaacgattgggtttagttaaacaggaaaaagacctagtagatttgaccaagccgtgcggtgtacgtaaaccagaagagaaggaagttactgagaagtcgaattgcaaaaaggtaaataagagaattgttactgatcagaagccatttggttgtggttataacgctgatcatgaagaagagggagtgattagtaaaatgttggaagatccgttgatgacatcgtcaattgctgatatttttggtgattcggctgttgaagcaaatgatatttgggtggattacaattcagtggaatttatttccattgtagatgatttcaagtttgattttgtggagaatgatagagtaggaaaggagaaaacatttggatttaagattggggatcacactaaagttaatcaacatgccaaaatcgtatcgaccaatggggacttattcgtcgatgatttacttgattttgatccgttgatagatgattttaagttagaagattttcctatggatgatcttggattattaggagatccagaggatgatgattttagttggtttaatggtactactgattggatcgataagtttttatgaatactttcttgacacggccaacggtattagtac

SEQ ID NO: 142 - protein, 329 aa, Arabidopsis thaliana
  G2132 polypeptide
MISFREENIDLNLIKTISVICNDPDATDSSSDDESISGNNPRRQIKPKPPKRYVSKICVPTLIKRYENVSNSTGNKAAGNRKTSSGFKGVRRRPWGKFAAEIRNPFEKKRKWLGTFPTEEEAAEAYQKSKREFDERLGLVKQEKDLVDLTKPCGVRKPEEKEVTEKSNCKKVNKRIVTDQKPFGCGYNADHEEEGVISKMLEDPLMTSSIADIFGDSAVEANDIWVDYNSVEFISIVDDFKFDFVENDRVGKEKTFGFKIGDHTKVNQHAKIVSTNGDLFVDDLLDFDPLIDDFKLEDFPMDDLGLLGDPEDDDFSWFNGTTDWIDKFL

SEQ ID NO: 143 - DNA, 1225 bp, Arabidopsis thaliana
  G2137
gggatttgactttagcacttcaaaatccaaagctaaaagacaaaaaagaatagaggttcgatttgcatctccattaatgggcatcgatctttctcttaagctcgaggccgaggagaaaaagaaagagatagaaggatcgaaacatagccgtgagaacaaagaagacgaagaacatgatgctagtggtgatgaagatgaacaaatggtgaaagaagacgaagatgattcttcttctttaggtttaagaacccgagaagaagaaaacgaacgtgaagagctcttgcagctacagatccagatggaaagtgtgaaagaagagaatactaggttgaggaagcttgtcgagcagactcttgaagattatcgtcatcttgagatgaaattcccggttatcgataaaaccaagaagatggatcttgaaatgttccttggagtacaaggcaaacgatgtgtggatataacaagtaaggctcggaaaagaggagctgagagatctccgtcaatggaaagagaaatagggctttcactttctctagagaaaaaacagaaacaagaagagagcaaagaagctgttcagtctcatcaccaaagatacaatagtagcagcttagatatgaatatgccacgtatcatttcatcttctcaaggtaatagaaaggccagggtgtccgtgagggcgagatgtgagaccgcaacaatgaatgatggatgccaatggaggaagtacggtcagaaaaccgcgaaagggaatccatgtcctcgagcttattaccgatgcaccgtggctccaggatgtcccgttagaaaacaggtgcaaaggtgtttagaagacatgtcaatactgataacaacctacgaaggaacacataaccatccacttccggtcggagcaacagccatggcttccactgcctctacttctccattcttgttactcgattccagtgacaacctctctcatccttcctattaccaaactcctcaagccatagactcttctttgattacatacccacaaaatagcagctacaacaatcgaaccataagaagcttgaactttgatggtccatctagaggagatcacgtttcatcttctcaaaaccgattaaattggatgatgtagagtttcctatatctctatgcttgttctttggtcccattatttgtcattatggattctttgcctttcttcttgttctcgtttctaacatttatgtttcgtata

SEQ ID NO: 144 - protein, 348 aa, Arabidopsis thaliana
  G2137 polypeptide
MGIDLSLKLEAEEKKKEIEGSKHSRENKEDEEHDASGDEDEQMVKEDEDDSSSLGLRTREEENEREELLQLQIQMESVKEENTRLRKLVEQTLEDYRHLEMKFPVIDKTKKMDLEMFLGVQGKRCVDITSKARKRGAERSPSMEREIGLSLSLEKKQKQEESKEAVQSHHQRYNSSSLDMNMPRIISSSQGNRKARVSVRARCETATMNDGCQWRKYGQKTAKGNPCPRAYYRCTVAPGCPVRKQVQRCLEDMSILITTYEGTHNHPLPVGATAMASTASTSPFLLLDSSDNLSHPSYYQTPQAIDSSLITYPQNSSYNNRTIRSLNFDGPSRGDHVSSSQNRLNWMM

SEQ ID NO: 145 - DNA, 1523 bp, Arabidopsis thaliana
  G2141
cttctgattagtgagtggtgttcatcaagtattagaagaagatggatttaagtgcgaaagatgagttttcagcagagaagaggaatcctgataactatgattctgttaataatccgtctggagattggcgagttgattcatatccttcagagaatctgatttcagctggtcctgcgtcttgttctccttctcagatgatggattcatttgggcaaactctttggtatgatcccacgagtgttcaggctgttggttatgccggttttaatggtggtaatgcttcgtcttcttcgtttaggggtagtattgatagatctcttgaaatgggttggaatctgcctaatttgttgcctcctaaaggcaatggtcttttcttaccgaatgcgagtagtttccttcctccgagtatggctcagttcccggctgattcaggttttatagagcgtgcagcgaggttttcgctctttagcggtgggaattttagtgatatggtgaatcaaccacttgggaattctgaggctattggtttgtttcttcaaggtggtggaacaatgcaagggcagtgtcaaagtaatgaacttaatgttggtgaacctcacaatgatgtatctgtagcagtgaaagaatcaactgttagatctagtgaacaagctaaaccgaatgttcctggatcgggcaatgtatccgaggatactcagtctagtggtggtaatggtcagaaaggcagagaaacctcttccaacacaaagaagaggaaaagaaatgggcagaagaactctgaagcagctcaatcacacagatcccagcagtctgaggaagaaccagacaacaatggtgatgaaaagcgcaatgatgagcaaagtccaaattcacctggaaagaagtcaaacagtgggaaacaacagggcaaacaaagttctgatcctccaaaagatggatatattcatgtacgggcacgaagaggccaggccacaaatagccatagtcttgcagaaagagttaggagagaaaaaattagtgaaaggatgaagtttcttcaagatctagtaccgggttgcaacaaggtgactgggaaggcagttatgcttgacgaaatcataaactacgtacaatcactacaacgccaagttgagtttttatcgatgaaacttgcaactgtgaacccacaaatggactttaaccttgaaggtcttcttgcaaaagatgcacttcaactacgagctggttcttcatctacaacaccattcccaccaaatatgtcaatggcttatcctcctctacctcatggattcatgcaacaaactctttccagcattggaaggaccattacctctccattgtctcctatgaatggtggattcaagcgacaggaaacaaatggatgggagggtgatttgcaaaatgtgatccacattaactatggagctggtgatgtcacacctgaccctcaagcagcagctacagcatctcttccagctgcaaatatgaaggttgagccatgatatttcgtcctgttagatagc

SEQ ID NO: 146 - protein, 486 aa, Arabidopsis thaliana
  G2141 polypeptide
MDLSAKDEFSAEKRNPDNYDSVNNPSGDWRVDSYPSENLISAGPASCSPSQMMDSFGQTLWYDPTSVQAVGYAGFNGGNASSSSFRGSIDRSLEMGWNLPNLLPPKGNGLFLPNASSFLPPSMAQFPADSGFIERAARFSLFSGGNFSDMVNQPLGNSEAIGLFLQGGGTMQGQCQSNELNVGEPHNDVSVAVKESTVRSSEQAKPNVPGSGNVSEDTQSSGGNGQKGRETSSNTKKRKRNGQKNSEAAQSHRSQQSEEEPDNNGDEKRNDEQSPNSPGKKSNSGKQQGKQSSDPPKDGYIHVRARRGQATNSHSLAERVRREKISERMKFLQDLVPGCNKVTGKAVMLDEIINYVQSLQRQVEFLSMKLATVNPQMDFNLEGLLAKDALQLRAGSSSTTPFPPNMSMAYPPLPHGFMQQTLSSIGRTITSPLSPMNGGFKRQETNGWEGDLQNVIHINYGAGDVTPDPQAAATASLPAANMKVEP

SEQ ID NO: 147 - DNA, 777 bp, Arabidopsis thaliana
  G2145
atggacgtttttgttgatggtgaattggagtctctcttggggatgttcaactttgatcaatgttcatcatctaaagaggagagaccgcgagacgagttgcttggcctctctagcctttacaatggtcatcttcatcaacatcaacaccataacaatgtcttatcttctgatcatcatgctttcttgctccctgatatgttcccatttggtgcaatgccgggaggaaatcttccggccatgcttgattcttgggatcaaagtcatcacctccaagaaacgtcttctcttaagaggaaactacttgacgtggagaatctatgcaaaactaactctaactgtgacgtcacaagacaagagcttgcgaaatccaagaaaaaacagagggtaagctcggaaagcaatacagttgacgagagcaacactaattgggtagatggtcagagtttaagcaacagttcagatgatgagaaagcttcggtcacaagtgttaaaggcaaaactagagccaccaaagggacagccactgatcctcaaagcctttatgctcggaaacgaagagagaagattaacgaaaggctcaagacactacaaaaccttgtgccaaacgggacaaaagtcgatataagcacgatgcttgaagaagcggtccattacgtgaagttcttgcagcttcagattaagttgttgagctcggatgatctatggatgtacgcaccattggcttacaacggcctggacatggggttccatcacaaccttttgtctcggcttatgtga

SEQ ID NO: 148 - protein, 258 aa, Arabidopsis thaliana
  G2145 polypeptide
MDVFVDGELESLLGMFNFDQCSSSKEERPRDELLGLSSLYNGHLHQHQHHNNVLSSDHHAFLLPDMFPFGAMPGGNLPAMLDSWDQSHHLQETSSLKRKLLDVENLCKTNSNCDVTRQELAKSKKKQRVSSESNTVDESNTNWVDGQSLSNSSDDEKASVTSVKGKTRATKGTATDPQSLYARKRREKINERLKTLQNLVPNGTKVDISTMLEEAVHYVKFLQLQIKLLSSDDLWMYAPLAYNGLDMGFHHNLLSRLM

SEQ ID NO: 149 - DNA, 1466 bp, Arabidopsis thaliana
  G2150
gttttgtttttgaagaaacacacataaagtttgtctttttacttctcaaatttggttgttttcactcaatttcaatcttgctttctgattcagattctgggttttcttcagaattcccagagaagttgttggaattgaatttttcacttttttgttcataaaagttctagtctttttagatgaacatggacaaggaaacagagcaaaccctaaattacttacctttgggtcagagcgatccctttggcaatggcaatgaaggaacaattggagatttccttggaagatactgcaacaaccctcaggagatttcaccgttaactctacaatccttctctctgaattctcagatctccgagaatttcccaatctctggtggaatcagattccctccatatccaggtcaatttggatccgatcgtgaatttgggtcacaaccaacaacgcaggagagtaacaagagctctttgttggatccagattcagtttcggatcgagttcacaccacgaaatctaactctagaaagaggaagtcgattcctagtggtaatggcaaggagtctccagcttcatcgtctcttacagcttccaattcaaaggtttcaggagagaatggtggatctaaaggtgggaagagaagcaagcaagatgtagctgggagtagtaaaaacggagtagagaagtgcgatagtaaaggcgacaataaggacgatgctaagcctcctgaggcgcctaaagattatattcatgtcagagctagaaggggtcaagcaactgatagccatagtcttgctgaaagagcaagaagagaaaagattagtgagagaatgacgttgcttcaggatctggttcctggttgcaaccggattacagggaaagcagtcatgcttgatgaaattataaattatgtgcagtccttgcagagacaagttgagttcttgtccatgaagctggctaccgtaaatccaaggatggagtttaatgctaatgcttctttatccacagagatgattcaaccgggggagtcgttaacgcagtctctttacgcaatggcttgctcagagcaaagacttccatcagcatactattcacttggcaagaacatgccaagattctcagacacacaattcccctcaaacgatggatttgttcacactgagacaccaggattctgggaaaataatgacctgcaaagcattgttcagatgggttttggagatatcctccagcaacagagcaacaacaacaacaacaactgttctgagccaacgcttcagatgaagcttgaaccatagtccatagctatgattattatctctgttgtacatacagaaaaccaagtagtgatgagtaacggagtgaatcatattggaattttaatgtttacaatcgttgcttctttgcttgtgtctctgttgatttcttctcaaccttaaacaaaaaaaaaacaagaaaacttcagatta

SEQ ID NO: 150 - protein, 371 aa, Arabidopsis thaliana
  G2150 polypeptide
MNMDKETEQTLNYLPLGQSDPFGNGNEGTIGDFLGRYCNNPQEISPLTLQSFSLNSQISENFPISGGIRFPPYPGQFGSDREFGSQPTTQESNKSSLLDPDSVSDRVHTTKSNSRKRKSIPSGNGKESPASSSLTASNSKVSGENGGSKGGKRSKQDVAGSSKNGVEKCDSKGDNKDDAKPPEAPKDYIHVRARRGQATDSHSLAERARREKISERMTLLQDLVPGCNRITGKAVMLDEIINYVQSLQRQVEFLSMKLATVNPRMEFNANASLSTEMIQPGESLTQSLYAMACSEQRLPSAYYSLGKNMPRFSDTQFPSNDGFVHTETPGFWENNDLQSIVQMGFGDILQQQSNNNNNNCSEPTLQMKLEP

SEQ ID NO: 151 - DNA, 1496 bp, Arabidopsis thaliana
  G2157
tcttttgattttaaccttttttcagtagcaagccaaaaaaaaaaaacagacaaagaagttccttttatgataaaggtatgatgatagcaaacaaatgatacccccatgtcttgtgtgtctgcttcatgcaacatgttggtttggatttggttaatctaaaagtttaagataaggttttcggattctcttcctgtcttgtaatagtttcttgtcggagagccatcaacaccaacttcaacaaaaaaaacaagaaaaagaaaaagattctctttctcgttttatttccattagagaagaaaaaaagaatggcgaatccttggtgggtagggaatgttgcgatcggtggagttgagagtccagtgacgtcatcagctccttctttgcaccacagaaacagtaacaacaacaacccaccgactatgactcgttcggatccaagattggaccatgacttcaccaccaacaacagtggaagccctaatacccagactcagagccaagaagaacagaacagcagagacgagcaaccagctgttgaacccggatccggatccgggtctacgggtcgtcgtcctagaggtagacctcctggttccaagaacaaaccaaagagtccagttgttgttaccaaagaaagccctaactctctccagagccatgttcttgagattgctacgggagctgacgtggcggaaagcttaaacgcctttgctcgtagacgcggccggggcgtttcggtgctgagcggtagtggtttggttactaatgttactctgcgtcagcctgctgcatccggtggagttgttagtttacgtggtcagtttgagatcttgtctatgtgtggggcttttcttcctacgtctggctctcctgctgcagccgctggtttaaccatttacttagctggagctcaaggtcaagttgtgggaggtggagttgctggcccgcttattgcctctggacccgttattgtgatagctgctacgttttgcaatgccacttatgagaggttaccgattgaggaagaacaacagcaagagcagccgcttcaactagaagatgggaagaagcagaaagaagagaatgatgataacgagagtgggaataacggaaacgaaggatcgatgcagccgccgatgtataatatgcctcctaattttatcccaaatggtcatcaaatggctcaacacgacgtgtattggggtggtcctccgcctcgtgctcctccttcgtattgattagttagataggcggtggttggtgcgttctttttactggaatgattatattttccattaggatggttaggcttttgtttattaaagctatcaagtttcttttttttttacggataattcggatgacaattagctagtgtttgtttgtttgttttgtggcggcttttctgacttgactattttgatcgcggatagctttgtatgaaagtgaattgattgtagaatcgtcttttgaattttgatgttggaaaaaaccaa

SEQ ID NO: 152 - protein, 310 aa, Arabidopsis thaliana
  G2157 polypeptide
MANPWWVGNVAIGGVESPVTSSAPSLHHRNSNNNNPPTMTRSDPRLDHDFTTNNSGSPNTQTQSQEEQNSRDEQPAVEPGSGSGSTGRRPRGRPPGSKNKPKSPVVVTKESPNSLQSHVLEIATGADVAESLNAFARRRGRGVSVLSGSGLVTNVTLRQPAASGGVVSLRGQFEILSMCGAFLPTSGSPAAAAGLTIYLAGAQGQVVGGGVAGPLIASGPVIVIAATFCNATYERLPIEEEQQQEQPLQLEDGKKQKEENDDNESGNNGNEGSMQPPMYNMPPNFIPNGHQMAQHDVYWGGPPPRAPPSY

SEQ ID NO: 153 - DNA, 687 bp, Arabidopsis thaliana
  G2294
tcctcccttaattagtatcaaaaatggtgaaaacacttcaaaagacaccaaagagaatgtcatctccatcatcatcatcttcatcatcctcatcaacatcatcatcatccataaggatgaagaagtacaagggagtgagaatgagaagttggggttcatgggtttcagagatcagagctcctaatcaaaagacaaggatctggcttggttcttactcaactgctgaagccgcggctagagcctacgacgcagcactcctatgtcttaaaggatcctcagctaataatctcaacttcccagagatctcaacttctctctaccatattatcaacaatggtgataacaacaatgacatgtcccctaagtctatacaaagagtagcagctgcagctgctgctgccaacacagatccttcctcatcatcagtctctacttcatctccattgctttcctctccatctgaagatctctatgatgttgtctccatgtcacagtatgaccaacaagtctccttgtctgaatcatcatcatggtacaactgctttgatggtgatgatcagttcatgttcattaatggagtctccgcgccgtatttgacaacatcactttctgatgatttctttgaggaaggagatatcagattatggaacttctgctgattctactttcattataccttattctttg

SEQ ID NO: 154 - protein, 211 aa, Arabidopsis thaliana
  G2294 polypeptide
MVKTLQKTPKRMSSPSSSSSSSSSTSSSSIRMKKYKGVRMRSWGSWVSEIRAPNQKTRIWLGSYSTAEAAARAYDAALLCLKGSSANNLNFPEISTSLYHIINNGDNNNDMSPKSIQRVAAAAAAANTDPSSSSVSTSSPLLSSPSEDLYDVVSMSQYDQQVSLSESSSWYNCFDGDDQFMFINGVSAPYLTTSLSDDFFEEGDIRLWNFC

SEQ ID NO: 155 - DNA, 860 bp, Arabidopsis thaliana
  G2296
atcctaaacagaaaatatgtctcttgagattgatgcgaaggctgtctcagcactcctccttggccaaggatgcgctaacaatctcaagacgctcctcaaaaaccatgaaacaggctcagtttcaacagagccactcatcaactccattcttgattctttctcgtttgctctgtcttctcagaacataccacgtcatgtgtctcaaagatcatcaaagaaaaagatgtgtggaatacaaggtatggaagattctccgacaccggcccacattgatggcttcatctggaggaaatatggacaaaagaccatcaaaacctctccgcaccaaaggtggtactaccgatgtgcctatgcgaaagaccaaaactgcgacgctaccaagcgggtacagaagatccaagacaatcctccagtgtacagaaacacctatgtcggacaacatgcatgtgaagctccagcttatgcagttaataatggtggtacatacggttcaaaaatgatcaaattcgactatgttattcctgaatcggttatgcctcaacctttatcaattgattcccaagaaattaccatggaggataaagacacagacgaccatattttgaactatattaacgagcatttgatggaagatgaggcgtatgatgttttccctgatgtacttggagaacgttgctgctttggattagaaccctttccaggattgaacattaataaatcttaaaagcttttcatgttcttcgatcttatggtggagaatgaatgattcattcttcatttcttttcatgttcatgttttgtaattttgatttacgtgttgtttttttgtaaaaggaagttttatcagtgatgtatttctt

SEQ ID NO: 156 - protein, 235 aa, Arabidopsis thaliana
  G2296 polypeptide
MSLEIDAKAVSALLLGQGCANNLKTLLKNHETGSVSTEPLINSILDSFSFALSSQNIPRHVSQRSSKKKMCGIQGMEDSPTPAHIDGFIWRKYGQKTIKTSPHQRWYYRCAYAKDQNCDATKRVQKIQDNPPVYRNTYVGQHACEAPAYAVNNGGTYGSKMIKFDYVIPESVMPQPLSIDSQEITMEDKDTDDHILNYINEHLMEDEAYDVFPDVLGERCCFGLEPFPGLNINKS

SEQ ID NO: 157 - DNA, 755 bp, Arabidopsis thaliana
  G2313
cgtcgacacaatcgctcttccgtaacatattccacaaaacgatcttcttgtttcttgaatttttagccatctcttttttttttttctcattttctcggatactatggcttcgagtccacgctggacggaggacgacaacaggcgttttaagtcagctctgtcgcaattccctccggataacaagcgtttggtgaatgtcgcccagcatctgccgaaacctttggaggaggtgaagtactactacgaaaagttggtcaacgatgtttatctgccgaaacctttagagaatgtcacccagcatctgcagaaacctatggaaatggaggagatgaagtacatgtacgaaaagatggccaacgatgttaatcagatgcccgagtacgtaccactggcggaatcgagtcagtccaaacgcaggaagaaggatacgccaaatccttggacagaagaggaacacagattgtttctgcaaggattgaaaaagtatggggaaggagcttcgacgttgacatcaacgaattttgtgaagacaaagactccacggcaagtgtcaagccatgcacagtattacaaaaggcaaaaatcggacaataagaaggagaaacgccggagtatttttgacataactttggagtctaccgagggcaatccagattctggaaatcagaaccctccggatgatgatgatccgtcccaaggtcaaggcacttgtcttggagtttagatgttggaagatagaagaatggtgtgaaagc

SEQ ID NO: 158 - protein, 206 aa, Arabidopsis thaliana
  G2313 polypeptide
MASSPRWTEDDNRRFKSALSQFPPDNKRLVNVAQHLPKPLEEVKYYYEKLVNDVYLPKPLENVTQHLQKPMEMEEMKYMYEKMANDVNQMPEYVPLAESSQSKRRKKDTPNPWTEEEHRLFLQGLKKYGEGASTLTSTNFVKTKTPRQVSSHAQYYKRQKSDNKKEKRRSIFDITLESTEGNPDSGNQNPPDDDDPSQGQGTCLGV

SEQ ID NO: 159 - DNA, 1409 bp, Arabidopsis thaliana
  G2417
cataccggtggaagattctgctttactacgctctccgcttcttcttctcctcgattcgattctcctcatgggtttatcatgaatttttaggttttgagtaattcagaaactcgagtgatgatcccgaatgatgatgatgatgcaaattctatgaagaattatccgttaaatgatgatgatgcaaattctatgaagaattatccgttaaatgatgatgatgcaaattctatggagaattatccgttaaggtcaattccgacggagctttcacacacttgttcattgataccaccttctttaccaaacccttcagaagcagcagcagacatgtccttcaattcagaactcaatcaaatcatggcaaggccttgtgatatgctccctgccaatggtggagctgttggtcataacccttttttggaaccaggattcaactgccccgagacaacagattggattccctctccactcccccatatttattttccttcgggttctcccaatctaataatggaggatggtgtcattgatgagattcacaaacaaagtgacttgccactttggtatgacgacttgattaccactgatgaagatccactcatgtctagtatcttgggcgatcttctccttgacactaatttcaactcagcttcaaaggtccagcaaccaagtatgcaatcgcagattcaacaaccccaagctgttctgcagcagccttcttcttgtgtggaattgcgcccacttgataggacagtatcctcaaacagcaacaacaatagcaacagtaataatgcagcagcagcagctaagggacgtatgcgttggacgcctgaacttcatgaggtttttgttgacgctgttaaccagctcggtggcagtaatgaagcaactcctaaaggtgtcctgaagcatatgaaagtcgaaggtttgactatttttcatgtcaaaagtcatttgcagaaatatagaacagctaaatatataccagtaccatcagaaggttcgccggaggcaaggttgacaccgcttgagcaaattacatctgatgatacgaaacgtgggatagatatcactgagactctgcgaattcagatggaacatcagaagaaactgcatgagcagcttgagagtctaagaacaatgcaacttcggatagaagagcaaggaaaggcgctgttgatgatgattgagaagcaaaatatgggtttcggcggaccagaacaaggagagaaaacaagtgcgaaaacgcctgaaaatggttcagaggagtcggaatccccgcggccaaagcgtccgagaaatgaagaatgaaggaaacctttcttcggatggtagatcataaaactgtggttttggtggagttgtagagtatgacttattaggagtagagctttcagtcttcttcaggc

SEQ ID NO: 160 - protein, 397 aa, Arabidopsis thaliana
  G2417 polypeptide
MIPNDDDDANSMKNYPLNDDDANSMKNYPLNDDDANSMENYPLRSIPTELSHTCSLIPPSLPNPSEAAADMSFNSELNQIMARPCDMLPANGGAVGHNPFLEPGFNCPETTDWIPSPLPHIYFPSGSPNLIMEDGVIDEIHKQSDLPLWYDDLITTDEDPLMSSILGDLLLDTNFNSASKVQQPSMQSQIQQPQAVLQQPSSCVELRPLDRTVSSNSNNNSNSNNAAAAAKGRMRWTPELHEVFVDAVNQLGGSNEATPKGVLKHMKVEGLTIFHVKSHLQKYRTAKYIPVPSEGSPEARLTPLEQITSDDTKRGIDITETLRIQMEHQKKLHEQLESLRTMQLRIEEQGKALLMMIEKQNMGFGGPEQGEKTSAKTPENGSEESESPRPKRPRNEE

SEQ ID NO: 161 - DNA, 816 bp, Arabidopsis thaliana
  G2425
atggggaggacgacgtggttcgacgttgacgggttgaggaaaggagagtggacggcggaggaagaccggaagctcgtggtttacatcaacgaacacggtctaggcgagtggggttcactgcctaagagagccggtctacaaagatgtggaaagagttgtagattaagatggctgaattatttgaggcctgggattaaaagaggcaagttcactcctcaggaagaagaagaaatcatcaaataccatgctcttcttggaaacaggtgggcagcaatagctaagcaaatgccaaacagaacagataatgacataaagaaccattggaactcatgccttaagaaaagacttgctaaaaaaggaatcgatccaatgacccatgagccaacaacaacaacaagcctcaccgtcgatgtcacctcctcatcaactacgtcgtctcctacaccgagccctacttcttcttctttttcctcctgttcctctactggctctgcacgtttccttaacaagctcgctgctggaatctcgtcaagaaaacacggactagagagtatcaagacagtgatattggcagaacaaccaagagaagccgttgatgaagagaagatgatgacaattaacatgaaagagaaggaattgattagttgttacatggagattgatgagacgatgagtattgatgaactaccttgtgatgactcgacgtctggcttcgtggcttttgacgactactcattaatcgacccatacagagacggtgtgtacgtatctgatttctacgatgagactgaacaccttgacctgttccttctttga

SEQ ID NO: 162 - protein, 271 aa, Arabidopsis thaliana
  G2425 polypeptide
MGRTTWFDVDGLRKGEWTAEEDRKLVVYINEHGLGEWGSLPKRAGLQRCGKSCRLRWLNYLRPGIKRGKFTPQEEEEIIKYHALLGNRWAAIAKQMPNRTDNDIKNHWNSCLKKRLAKKGIDPMTHEPTTTTSLTVDVTSSSTTSSPTPSPTSSSFSSCSSTGSARFLNKLAAGISSRKHGLESIKTVILAEQPREAVDEEKMMTINMKEKELISCYMEIDETMSIDELPCDDSTSGFVAFDDYSLIDPYRDGVYVSDFYDETEHLDLFLL

SEQ ID NO: 163 - DNA, 1026 bp, Arabidopsis thaliana
  G2505
atgggttcttcgtcgaacggaggagtgccacctggtttccggtttcatccgacggacgaagagcttctccattactacttgaagaagaaaatctcttaccaaaagtttgagatggaagtcatcagagaggttgacttaaacaagcttgagccttgggatttgcaagagagatgcaagataggatcaacaccacaaaacgaatggtacttcttcagccacaaggacaggaaatatccgacggggtcaaggaccaaccgtgctactcatgcagggttctggaaggcgacgggacgtgacaagtgcataaggaactcttacaaaaagataggaatgaggaagacacttgtgttctacaaaggtagagctcctcatggccaaaagactgattggatcatgcatgagtaccgtcttgaagacgctgatgatcctcaagccaaccctagtgaagatggatgggtggtatgtagagtgtttatgaagaaaaatttgttcaaggtagtaaatgaaggtagctcaagcattaactcattggaccaacacaaccatgacgcatctaacaacaaccatgcacttcaagctcgtagctttatgcaccgagacagtccataccagctagtacgtaaccacggagccatgacattcgaacttaacaagcctgaccttgctcttcatcaatacccaccaatcttccacaagccaccttcacttggatttgactactcttcaggacttgcaagggacagtgagagtgcggctagtgaagggttacaataccagcaagcgtgtgagccgggtttagacgttggtacatgtgagacagtggctagtcataatcatcaacaaggtctaggtgaatgggcaatgatggatagacttgtgacttgtcacatgggaaatgaagattcctctagagggattacgtatgaggatggtaacaacaattcgtcctctgtggttcagccagttcccgcgacgaaccagctaacattgcgtagtgagatggatttctggggttattctaaatag

SEQ ID NO: 164 - protein, 341 aa, Arabidopsis thaliana
  G2505 polypeptide
MGSSSNGGVPPGFRFHPTDEELLHYYLKKKISYQKFEMEVIREVDLNKLEPWDLQERCKIGSTPQNEWYFFSHKDRKYPTGSRTNRATHAGFWKATGRDKCIRNSYKKIGMRKTLVFYKGRAPHGQKTDWIMHEYRLEDADDPQANPSEDGWVVCRVFMKKNLFKVVNEGSSSINSLDQHNHDASNNNHALQARSFMHRDSPYQLVRNHGAMTFELNKPDLALHQYPPIFHKPPSLGFDYSSGLARDSESAASEGLQYQQACEPGLDVGTCETVASHNHQQGLGEWAMMDRLVTCHMGNEDSSRGITYEDGNNNSSSVVQPVPATNQLTLRSEMDFWGYSK

SEQ ID NO: 165 - DNA, 583 bp, Arabidopsis thaliana
  G10
ggtgattcaatacaaacgaaaacaagagtttcctatggtgaaagaaggaatggtcatgaccgagaagccaaagaggaatctcataagctctaatgagaagcgatacaaaggaataaggatgaggaagtggggcaagtgggtggctgagataagagagcctaataaacgatcacggatctggcttggttcatacaaaaccgccgttgccgcggcacgggcctacgataccgctgtgttttacttacgtggtccttcggcgagactcaatttccctgaagaggtctttaaggatggaaacggcggtgaaggcttaggaggagatatgtctccgacgttgatacggaagaaggcggctgaggtgggagctagagtcgacgcagagttgcggttagagaataggatggttgagaacttagacatgaataagttgccggaggcatatggattgtaatttatagtttggtagtttataggttggagattgcccggagacagagtcaaacagaggttctctgactcatatgaggcataatatagttaatatagtaatttttgttttgagcatagtaattatgtcataacc

SEQ ID NO: 166 - protein, 138 aa, Arabidopsis thaliana
  G10 polypeptide
MVKEGMVMTEKPKRNLISSNEKRYKGIRMRKWGKWVAEIREPNKRSRIWLGSYKTAVAAARAYDTAVFYLRGPSARLNFPEEVFKDGNGGEGLGGDMSPTLIRKKAAEVGARVDAELRLENRMVENLDMNKLPEAYGL

SEQ ID NO: 167 - DNA, 831 bp, Arabidopsis thaliana
  G12
gtgtcggtgaattttttgaaacttcttctcttttgcggtttcgtgttccactcctctcttcttggcccacgtgttcatcaatctctccctccgcatgtaatcgcttcgccgtcaatatcacatctttcttcttctttatctttaaaatctctttagatcgattcttttgtggattcttgaaatctccggagaaaaccactatggagacggcgactgaagtggccacggtggtgtcaactccggcggttacggttgcggcggtggcgacgaggaagagagataagccgtataaagggataaggatgaggaagtgggggaagtgggtggcggagataagagagcctaataaaaggtcaaggatctggcttggctcttactctactcctgaagcggcggcgcgtgcttacgacacggcggtgttttatctccgaggtccttctgctcggcttaacttcccggagcttttagccggagtgacggtgacgggaggaggcggaggaggagtgaacggtggtggagatatgtcggcggcgtatataaggagaaaagcggcggaggttggagcacaagtggatgcgttagaagcggcgggggcgggagggaatcgtcatcatcatcatcatcaacatcaacgtggtaatcatgattacgtagataatcatagtgattatcgtattaatgatgatcttatggagtgtagtagtaaagaagggtttaagaggtgtaatggatcgttggaacgggttgatttaaacaaattacccgatccggaaacttcagatgacgattaggaaagcaaaaaatagaaacaaaaaaaaaaaaaaaaaaaaa

SEQ ID NO: 168 - protein, 196 aa, Arabidopsis thaliana
  G12 polypeptide
METATEVATVVSTPAVTVAAVATRKRDKPYKGIRMRKWGKWVAEIREPNKRSRIWLGSYSTPEAAARAYDTAVFYLRGPSARLNFPELLAGVTVTGGGGGGVNGGGDMSAAYIRRKAAEVGAQVDALEAAGAGGNRHHHHHQHQRGNHDYVDNHSDYRINDDLMECSSKEGFKRCNGSLERVDLNKLPDPETSDDD

SEQ ID NO: 169 - DNA, 964 bp, Arabidopsis thaliana
  G28
gaaatctcaacaagaaccaaaccaaacaacaaaaaaacattcttaataattatctttctgttatgtcgatgacggcggattctcaatctgattatgcttttcttgagtccatacgacgacacttactaggagaatcggagccgatactcagtgagtcgacagcgagttcggttactcaatcttgtgtaaccggtcagagcattaaaccggtgtacggacgaaaccctagctttagcaaactgtatccttgcttcaccgagagctggggagatttgccgttgaaagaaaacgattctgaggatatgttagtttacggtatcctcaacgacgcctttcacggcggttgggagccgtcttcttcgtcttccgacgaagatcgtagctctttcccgagtgttaagatcgagactccggagagtttcgcggcggtggattctgttccggtcaagaaggagaagacgagtcctgtttcggcggcggtgacggcggcgaagggaaagcattatagaggagtgagacaaaggccgtgggggaaatttgcggcggagattagagatccggcgaagaacggagctagggtttggttaggaacgtttgagacggcggaggacgcggcgttggcttacgacagagctgctttcaggatgcgtggttcccgcgctttgttgaattttccgttgagagttaattcaggagaacccgacccggttcgaatcaagtccaagagatcttctttttcttcttctaacgagaacggagctccgaagaagaggagaacggtggccgccggtggtggaatggataagggattgacggtgaagtgcgaggttgttgaagtggcacgtggcgatcgtttattggttttataattttgatttttctttgttggatgattatatgattcttcaaaaaagaagaacgttaataaaaaaattcgtttattattaaaaaaaaaaaaaaaaaa

SEQ ID NO: 170 - protein, 268 aa, Arabidopsis thaliana
  G28 polypeptide
MSMTADSQSDYAFLESIRRHLLGESEPILSESTASSVTQSCVTGQSIKPVYGRNPSFSKLYPCFTESWGDLPLKENDSEDMLVYGILNDAFHGGWEPSSSSSDEDRSSFPSVKIETPESFAAVDSVPVKKEKTSPVSAAVTAAKGKHYRGVRQRPWGKFAAEIRDPAKNGARVWLGTFETAEDAALAYDRAAFRMRGSRALLNFPLRVNSGEPDPVRIKSKRSSFSSSNENGAPKKRRTVAAGGGMDKGLTVKCEVVEVARGDRLLVL

SEQ ID NO: 171 - DNA, 553 bp, Arabidopsis thaliana
  G30
ctcttctgacgcacaacagtatatacacatacacagatatatggatcaaggaggtcgtagcagtggtagtggaggaggaggagccgagcaagggaagtaccgtggagtaaggagacgaccttggggtaaatacgccgcggaaataagagattcgaggaagcacggagagcgtgtgtggctagggacattcgacactgcggaagacgcggctcgagcctatgaccgagccgcctattcaatgagaggcaaagctgccattctcaacttccctcacgagtataacatgggaaccggatcctcatccactgcggctaattcttcttcctcgtcgcagcaagtttttgagtttgagtacttggacgatagcgttttggatgaacttcttgaatatggagagaactataacaagactcataatatcaacatgggcaagaggcaataaagggaatacaatcggtattaactgaaagttatgtgaaagaccattttcagttataacaaataaaataaaatcccaagcgtacaaagctgtttctaaaaaaaaaaaaaaaaa

SEQ ID NO: 172 - protein, 133 aa, Arabidopsis thaliana
  G30 polypeptide
MDQGGRSSGSGGGGAEQGKYRGVRRRPWGKYAAEIRDSRKHGERVWLGTFDTAEDAARAYDRAAYSMRGKAAILNFPHEYNMGTGSSSTAANSSSSSQQVFEFEYLDDSVLDELLEYGENYNKTHNINMGKRQ

SEQ ID NO: 173 - DNA, 784 bp, Arabidopsis thaliana
  G165
cttcaaaacatctaaaaaatggtgaaaaaaactcttggtcgtagaaaggtagagatagtgaaaatgactaaggaatcaaaccttcaagtcacattttccaagagaaaagctggtctttttaagaaggctagtgaattttgcacattatgtgatgcaaaaattgcgatgatcgtgttttcaccagctggaaaagtattttcttttggtcatccaaatgttgatgttctgcttgaccactttcgagggtgtgttgtaggacacaacaacacaaaccttgatgaaagctacacaaagcttcatgttcaaatgctcaacaaatcctacactgaggtgaaggcggaagtagaaaaagaacaaaagaataagcagtcgcgggctcaaaatgaaagagaaaacgaaaacgctgaggagtggtggagtaagtctccattagaactcaacttaagtcaatcaacctgtatgatacgtgttcttaaagatttgaagaagatagttgatgaaaaagcaattcaattaatccatcaaacaaacccaaacttctatgttggaagttctagcaatgctgctgctccagcaactgttagtggtggtaatatctccacaaaccaggggttctttgatcaaaacggaatgacgactaatcctactcaaacacttctgtttggatttgatattatgaatcgcacaccaggagtttaaataagtctatcctcattatgggtcttggtactataagttcatctctctcgttgttgactttttaagtctccaatagtttgttgtg

SEQ ID NO: 174 - protein, 226 aa, Arabidopsis thaliana
  G165 polypeptide
MVKKTLGRRKVEIVKMTKESNLQVTFSKRKAGLFKKASEFCTLCDAKIAMIVFSPAGKVFSFGHPNVDVLLDHFRGCVVGHNNTNLDESYTKLHVQMLNKSYTEVKAEVEKEQKNKQSRAQNERENENAEEWWSKSPLELNLSQSTCMIRVLKDLKKIVDEKAIQLIHQTNPNFYVGSSSNAAAPATVSGGNISTNQGFFDQNGMTTNPTQTLLFGFDIMNRTPGV

SEQ ID NO: 175 - DNA, 1269 bp, Arabidopsis thaliana
  misc_feature (1239)..(1239): n is a, c, g, or t
  misc_feature (1242)..(1242): n is a, c, g, or t
  misc_feature (1244)..(1244): n is a, c, g, or t
  misc_feature (1261)..(1263): n is a, c, g, or t
  misc_feature (1266)..(1267): n is a, c, g, or t
  G195
ttttctttttctttctttttggtttaagttttttctctttgttcttcgtcatgtctcatgaaatcaaagatcttaacaactatcactacacttcatcgtataatcattacaatatcaacaaccaaaatatgattaatctcccttacgtttctggtccatctgcttataatgcaaacatgatctcatcatcacaagtaggttttgatctaccctcgaagaacttgagtcctcaaggagccttcgagttgggtttcgagctttctccatcttcttctgacttttttaatccttccctcgatcaagagaacggtttgtataatgcttataattataatagtagtcaaaagagtcatgaagttgtcggtgatggttgtgcaaccattaagagtgaagttagggtttcagcatctccttcttcaagtgaggccgatcatcatccaggagaagattccggcaagatccggaagaaaagagaagttcgcgatggaggagaagatgatcaacgctctcagaaagtagttaaaacaaagaagaaagaggagaagaaaaaagagccacgagtctcgttcatgactaagaccgaagttgatcatctcgaagacggctatcgttggagaaagtatggccaaaaagcagtcaaaaacagtccttatccgaggagttactatagatgcacgactcagaagtgcaacgtgaagaagagagtggagagatcttaccaagacccaacggtcgtcatcacaacctacgagagtcaacacaaccatccgatcccgaccaatcgtcggacagcaatgttctctggaaccaccgcatctgattataacccatcatcgtctccaatattctccgatctcatcatcaatactccaagaagcttctcaaatgatgatctcttccgtgtgccatacgctagtgtgaacgtgaaccctagttatcatcaacagcaacatggatttcatcaacaggagagtgagttcgagctcttgaaggagatgtttccttcggttttcttcaaacaagagccttgatgatataatataatatagaaacaattttttttctgctaagaaatatagaacaaaacttggatgcataataagtgatgatagtgttatttattttttgcatgtatatattatacatgttttgttaactagctataggatatactggtagtaattaagcataaatatggagcccttcgacttattacaataatttttggtatggaaaaanttngntacatgcctgccttttnnnttnngg

SEQ ID NO: 176 - protein, 326 aa, Arabidopsis thaliana
  G195 polypeptide
MSHEIKDLNNYHYTSSYNHYNINNQNMINLPYVSGPSAYNANMISSSQVGFDLPSKNLSPQGAFELGFELSPSSSDFFNPSLDQENGLYNAYNYNSSQKSHEVVGDGCATIKSEVRVSASPSSSEADHHPGEDSGKIRKKREVRDGGEDDQRSQKVVKTKKKEEKKKEPRVSFMTKTEVDHLEDGYRWRKYGQKAVKNSPYPRSYYRCTTQKCNVKKRVERSYQDPTVVITTYESQHNHPIPTNRRTAMFSGTTASDYNPSSSPIFSDLIINTPRSFSNDDLFRVPYASVNVNPSYHQQQHGFHQQESEFELLKEMFPSVFFKQEP

SEQ ID NO: 177 - DNA, 1089 bp, Arabidopsis thaliana
  G198
atggcaaggtcaccttgttgcgagaagaacggactcaagaaagggccatggacatctgaagaagaccagaagcttgttgactatatccagaaacatggttatggtaactggagaaccctccccaaaaatgccggtacgtgtttgcaaagatgtggcaaaagttgtaggttaaggtggactaattatctccgaccagatataaaacgaggaagattctcttttgaggaagaagaagccattattcagcttcatagcttcttaggaaacaagtggtctgcgattgcggcgcgtttgccaggaagaacagataatgagatcaagaacttttggaacactcatataagaaagaagctacttagaatggggattgatccagtgactcacagtccacgactcgatctcctcgatatctcatccatcttagcttcatctctatacaattcatcttcacatcacatgaacatgtcaagactcatgatggatactaatcgtcgtcatcagcaacaacatccattggttaaccccgagatactcaagcttgcgacctctatattctctcaaaaccaaaaccaaaaccacaaccaaaatcaaaaccaaaaccaaaacctcgtggtggatcatgagaagcaaacagtttatcatcatcatgatgttaaccaaaccggagtaaaccaataccaaaccgaccaatatttcgagaacgcgattactcaagaactccaatcttccatgccaccattccccaatgaagctcatcagtttaacgacatggatcatcacttcaatggttttggagaacaaaatcttgtttcaacttctactacgtcagtccaagattgctataatccgtcattcaacgattattcaagttcaaattttgtcttagatcattcttattcggatcagagcttcaacttcgcaaattcggtcttaaacacgccatcctcgagcccgagcccgactacgttaaactcgagttacatcaatagtagcagttgcagcactgaggatgaaatagaaagctattgcagtaatctcatgaagtttgatattcccgatttcttggacgttaatggttttattatataa

SEQ ID NO: 178 - protein, 362 aa, Arabidopsis thaliana
  G198 polypeptide
MARSPCCEKNGLKKGPWTSEEDQKLVDYIQKHGYGNWRTLPKNAGTCLQRCGKSCRLRWTNYLRPDIKRGRFSFEEEEAIIQLHSFLGNKWSAIAARLPGRTDNEIKNFWNTHIRKKLLRMGIDPVTHSPRLDLLDISSILASSLYNSSSHHMNMSRLMMDTNRRHQQQHPLVNPEILKLATSIFSQNQNQNHNQNQNQNQNLVVDHEKQTVYHHHDVNQTGVNQYQTDQYFENAITQELQSSMPPFPNEAHQFNDMDHHFNGFGEQNLVSTSTTSVQDCYNPSFNDYSSSNFVLDHSYSDQSFNFANSVLNTPSSSPSPTTLNSSYINSSSCSTEDEIESYCSNLMKFDIPDFLDVNGFII

SEQ ID NO: 179 - DNA, 584 bp, Arabidopsis thaliana
  G225
ctctctctctcactcttttcttttccgagaacccaacaaaaaaaaagctactattaatccttcccctcgtgaggaaatcatttcttcttgtttctcgagatttattctctttctctctctctttctctgtgtgtttcgtgtcttcagattagttcgatgtttcgttcagacaaggcggaaaaaatggataaacgacgacggagacagagcaaagccaaggcttcttgttccgaagaggtgagtagtatcgaatgggaagctgtgaagatgtcagaagaagaagaagatctcatttctcggatgtataaactcgttggcgacaggtgggagttgatcgccggaaggatcccgggacggacgccggaggagatagagagatattggcttatgaaacacggcgtcgtttttgccaacagacgaagagacttttttaggaaatgattttttttgtttggattaaaagaaaattttcctctccttaattcacaagacaagaaaaaaaggaaatgtacctgtccttgaattactattttggaatgtataattatctatatatataagaagaaaaaattgcttaggaattt

SEQ ID NO: 180 - protein, 94 aa, Arabidopsis thaliana
  G225 polypeptide
MFRSDKAEKMDKRRRRQSKAKASCSEEVSSIEWEAVKMSEEEEDLISRMYKLVGDRWELIAGRIPGRTPEEIERYWLMKHGVVFANRRRDFFRK

SEQ ID NO: 181 - DNA, 1317 bp, Arabidopsis thaliana
  G248
tcgacagttggtgtttaaatggaattctcattgatctccgatgaaaatttcatcttaaacgatgctcatcgatgtcctgttaatgatgatgcatcgcatataccaaaaaataatcttaactttttcaatgacaatttaggtcaatcttctcgtactggatggtctttttcaccagatctgactgatatctctaatcagcaccaccaaaatcttatacctttgatcccaaattatgattctcaaaatcagaatttggatactaatcaaaaccatttggtttacaactcttcctcctatgaaattccatcaaactacccattcatgagtatcaaatcctactcaaatattgatactcttgagcaatctatgaataacatagtcaacaacggaaaaatccatatgatcgataatcccccaatttttgcaaaccctaagggtatattcgaaaattttcatgatttgcaggaatacactatagggaatgagattgtacacaatgaagaactgactaataagggttatgagccaactcttgataaggtaatgggtgaacctcaattatttgatgtgccagtgctagaaggtatcaaaaatacaaccaacgaaatcatgaatcaacttgaagatgataagatgaaaaaaacttatgagaataaaaaggaggcgagcacaagcaaatatttgaagaaaagtgacatcaccaaaaaaagatggacagaatctgaggacataaaattgaaagagatggtggcacttgaacccaaaaaatggacaaaggtcgcaaaacattttgaaggacgaacaccaaaacaatgcagagagaggtggcataaccatgctcgtcctaacgttaagaaaactacttggagtgaagaagaagatcaaatactaattgaagtacacaaagtaattggtgccaaatggatccagatctcagagcaacttccggggaggagctataacaatgttaagaaccattggaataccacaaagcgtcgggtgcaaaataaaagtggtcgaactgtcaaccgtgtcggcaataacatccttgaaaactacataaggagtatcacaatcaacaacgatgatgaatctgatggtgaaccgacaaacattgagaattatcatgatgactctgaagatatgttatatggggagatgaatttgagtccagaggctataacgcagaccaccaaaccattgaccgatgcttctacaatatcaccttatattccgatgccaaaagaaaactatactctggaggtttgtgaatcactggaggactatctagagctgctgcgttggtgggattaatgc

SEQ ID NO: 182 - protein, 431 aa, Arabidopsis thaliana
  G248 polypeptide
MEFSLISDENFILNDAHRCPVNDDASHIPKNNLNFFNDNLGQSSRTGWSFSPDLTDISNQHHQNLIPLIPNYDSQNQNLDTNQNHLVYNSSSYEIPSNYPFMSIKSYSNIDTLEQSMNNIVNNGKIHMIDNPPIFANPKGIFENFHDLQEYTIGNEIVHNEELTNKGYEPTLDKVMGEPQLFDVPVLEGIKNTTNEIMNQLEDDKMKKTYENKKEASTSKYLKKSDITKKRWTESEDIKLKEMVALEPKKWTKVAKHFEGRTPKQCRERWHNHARPNVKKTTWSEEEDQILIEVHKVIGAKWIQISEQLPGRSYNNVKNHWNTTKRRVQNKSGRTVNRVGNNILENYIRSITINNDDESDGEPTNIENYHDDSEDMLYGEMNLSPEAITQTTKPLTDASTISPYIPMPKENYTLEVCESLEDYLELLRWWD

SEQ ID NO: 183 - DNA, 971 bp, Arabidopsis thaliana
  G448
tttccatcttcctcatcaccttcccaagaagaagaacaccaaagaagaagaaaggttaataatgatgggcagtgtcgagctgaatctgagggagactgagctgtgtcttggtcttcccggtggagatacagtggctccggtaaccggaaacaagagagggttctcagagacggttgatctgaagctaaatctgaataatgagcctgcaaacaaggaaggatctacgactcatgacgtcgtgacttttgattccaaggagaagagtgcttgtcctaaagatccagccaaacctccggccaaggcacaagttgtgggatggccaccggtgagatcataccggaagaacgtgatggtttcctgccaaaaatcaagcggtggcccggaggcggcggcgttcgtgaaggtatcaatggacggagcaccgtacttgaggaaaatcgatttgaggatgtataaaagctacgatgagctttctaatgctttgtccaacatgttcagctcttttaccatgggcaaacatggaggagaagaaggaatgatagacttcatgaatgagaggaaattgatggatttggtgaatagctgggactatgttccctcttatgaagacaaagacggtgattggatgctcgtcggcgacgttccttggccaatgttcgtcgatacatgcaagcgtttacgtctcatgaaaggatcggatgccattggtctcgctccgagggcgatggagaagtgcaagagcagagcttgaagtcaaattaaaaggataagtggtatcgattatatatttgattaacacattgattggtgttaattgctctttttttttcttacgatgaaatacattgttcagtttcttttgattgtctgtgttttgatctggatttggtatgtagatatagtttgtatgctattatgtgtaatgaacttaagttaaatatttgagacatttgtaatggaaaatgtgtaat

SEQ ID NO: 184 - protein, 229 aa, Arabidopsis thaliana
  G448 polypeptide
MMGSVELNLRETELCLGLPGGDTVAPVTGNKRGFSETVDLKLNLNNEPANKEGSTTHDVVTFDSKEKSACPKDPAKPPAKAQVVGWPPVRSYRKNVMVSCQKSSGGPEAAAFVKVSMDGAPYLRKIDLRMYKSYDELSNALSNMFSSFTMGKHGGEEGMIDFMNERKLMDLVNSWDYVPSYEDKDGDWMLVGDVPWPMFVDTCKRLRLMKGSDAIGLAPRAMEKCKSRA

SEQ ID NO: 185 - DNA, 899 bp, Arabidopsis thaliana
  G455
tttctaatctattacaagtaacatgatcggccaacttatgaacctcaaggccacggagctctgtctcggcctccccggcggcgctgaagcagttgagagtcctgccaaatcggcggtgggaagcaagagaggcttctccgaaaccgttgatctcatgctcaatcttcaatctaacaaagaaggctccgttgatctcaaaaacgtttctgctgttcccaaggagaagactacccttaaagatccttctaagcctcctgctaaagcacaagtggtgggatggccacctgtgaggaactacaggaagaacatgatgactcagcagaagaccagtagtggtgcggaggaggccagcagtgagaaggccgggaactttggtggaggagcagccggagccggcttggtgaaggtctccatggacggtgctccatatctgaggaaagttgacctcaagatgtacaaaagctaccaggatctttctgatgcattggccaaaatgttcagctcctttactatgggaaactatggagcacaaggaatgatagatttcatgaacgagagcaagctaatgaatctgctgaatagctctgagtatgtgccaagctacgaggacaaagatggtgactggatgctcgttggcgatgtcccatgggaaatgtttgtcgagtcttgcaaacgtttgcgcattatgaagggatctgaagcagttggacttgctccgagagcaatggagaagtactgcaagaacagatcttgaattaataataaaaaaaaagaagcatcaatgatcaacaatatgacgggttcttgattttatatgtatttttatgattgtatgtggctatcacctatatatgtgtgttgtaattttaaatacttgatgggtatatagggcagtattt

SEQ ID NO: 186 - protein, 243 aa, Arabidopsis thaliana
  G455 polypeptide
MIGQLMNLKATELCLGLPGGAEAVESPAKSAVGSKRGFSETVDLMLNLQSNKEGSVDLKNVSAVPKEKTTLKDPSKPPAKAQVVGWPPVRNYRKNMMTQQKTSSGAEEASSEKAGNFGGGAAGAGLVKVSMDGAPYLRKVDLKMYKSYQDLSDALAKMFSSFTMGNYGAQGMIDFMNESKLMNLLNSSEYVPSYEDKDGDWMLVGDVPWEMFVESCKRLRIMKGSEAVGLAPRAMEKYCKNRS

SEQ ID NO: 187 - DNA, 1169 bp, Arabidopsis thaliana
  G456
cacacatctcacatccccctatctctctctctcttcaaacgttttagttccccaaaaaaatatcaaaagaactaaaagaaaaaccctagaagccgaagaatctcctactcgttgtcgatcggatcacctaactaattactcgttgataatcattatatcgagaaatatgattaattttgaggccacggagctgagattagggctaccgggtgggaatcacggaggagaaatggctggaaaaaataatggtaaaagaggattttctgagactgttgatctcaaactgaatctttcatcgacggctatggattcagtttccaaagtcgatttagagaatatgaaggagaaggtcgtaaaaccaccagccaaggcacaagttgtgggatggccaccggtacgatctttccgcaagaacgtcatgtccggccaaaaaccgaccaccggagatgccaccgaaggaaacgataagacttctggcagcagtggagccacctcatccgcctccgcatgtgccaccgtggcttatgtgaaggttagcatggacggtgcaccgtacctacggaaaattgacttgaaactctacaaaacttaccaagatctctccaacgccttaagcaaaatgtttagctcttttaccataggcaactatggaccacaaggaatgaaagatttcatgaatgagagtaaattgatcgatcttctaaacggatcagattatgttccaacatatgaagataaagatggcgactggatgcttgtaggagacgtaccgtgggagatgtttgttgattcatgcaaacgtatacgaataatgaagggatcagaagcaatcggacttgctccaagggcattagaaaagtgcaagaacagaagttgagttctcgacgacatttcgtgttcttacctaaaaaaggaagaaagcctgtttcgatcggttggatatctcgaaccgagaaagctaaaccggctcgaaactattgttccgagcaaggagtttgcttataatattaattaataataatattaatattgtggtgtattacattttaaaaaattaaatcgtttttgttatatgtattatatacatatattaatatgtatatttaattaggttgcatctatttccgttaaaaccaacttttgtttttacgcaaaaaaaaagagttcac

SEQ ID NO: 188 - protein, 236 aa, Arabidopsis thaliana
  G456 polypeptide
MINFEATELRLGLPGGNHGGEMAGKNNGKRGFSETVDLKLNLSSTAMDSVSKVDLENMKEKVVKPPAKAQVVGWPPVRSFRKNVMSGQKPTTGDATEGNDKTSGSSGATSSASACATVAYVKVSMDGAPYLRKIDLKLYKTYQDLSNALSKMFSSFTIGNYGPQGMKDFMNESKLIDLLNGSDYVPTYEDKDGDWMLVGDVPWEMFVDSCKRIRIMKGSEAIGLAPRALEKCKNRS

SEQ ID NO: 189 - DNA, 1041 bp, Arabidopsis thaliana
  G506
tttaaatattagctttcgacaactctcttgtgtcgcaagctacaagtgtgaattttgcaaatggggagttcatgtttgcctccaggatttagatttcatccaactgatgaagagctcataggctactacttgagtagaaaaatagaaggtctcgagattgagcttgaagtcattcctgttatcgacttatacaaatttgatccttgggagttgccaggtaaatctttccttccaaatagagatttggaatggttctttttctgtccaagagacaaaaaatatgcaaacggttctcgaaccaatagggctacaaaagcgggttattggaaagcaactggtaaagaccggaaaatcacttgtaaatcatcgcatgttatagctggataccgaaaaaccttagttttctatgaaggtcgtgccccattaggcgacagaactaattggtttatgcatgaatatcgtctatgcgatattgatgatcattcacaaaaatcaccaaatttcaagggagcttttgcgttatgtcgcgtagttaagaagaatgaactgaagaaaaattcgaaaagtttgaaaaataaaaacgaacaagacattggttcttgttactctagcctcgcgacctctccttgtcgcgatgaagcgtcgcagattcaatcgttcaagccttcttctactacaaacgactcttcaagcatttggatttctcctgatttcatccttgattcgtcaaaggattatcctcagattaaggaggttgcttctgagtgctttcccaactaccattttccggtcaccacggcaaaccaccacgtggaatttccggtgagctcttgttatttcaatgtggaccaggacattgatcagtcgatgcaaaccggttattggacaaattatgaaaatgaccaaaccggttcatttgactactcaaaccttttttagctacaagaaatgttggttcgttcttaggacaaaaacgccttttaacgttggtgtcttggaacttggaagaagaagaagaactagttgtgaacgtctatcatt

SEQ ID NO: 190 - protein, 292 aa, Arabidopsis thaliana
  G506 polypeptide
MGSSCLPPGFRFHPTDEELIGYYLSRKIEGLEIELEVIPVIDLYKFDPWELPGKSFLPNRDLEWFFFCPRDKKYANGSRTNRATKAGYWKATGKDRKITCKSSHVIAGYRKTLVFYEGRAPLGDRTNWFMHEYRLCDIDDHSQKSPNFKGAFALCRVVKKNELKKNSKSLKNKNEQDIGSCYSSLATSPCRDEASQIQSFKPSSTTNDSSSIWISPDFILDSSKDYPQIKEVASECFPNYHFPVTTANHHVEFPVSSCYFNVDQDIDQSMQTGYWTNYENDQTGSFDYSNLF

SEQ ID NO: 191 - DNA, 1832 bp, Arabidopsis thaliana
  G554
ccttccaaacactattggggaaatggcttcttctcttttttccggtgtaggtttaaggttttagatttgaaggcggatggtgaggagtttgtgttgatgaaatgggtgatttgaagttaaatacctttaagttcttttagccttaagttcttttagcctgtcattacaatatatgtttcagttgtgatcttttggtgctctccaaggtcttagggaatctccgtgtcccctctggtttctttctttgtataaagtctctggaatttaaagatgattttgtcctgttttcttcgaagaatttggcgaagaaacatcaaaagttcactatttgctttacgtgttatgcttgtttgactttgtgtgatctaacttttggttgaaaactaatgctcatcttttgttctttggaatgtcttgatctgcttgattttgaatgctttgtcacattgtttaaacaatttgttctttgttttcagttgaggaaaacatgaattcgacatcgacacattttgtgccaccgagaagagttggtatatacgaacctgtccatcaattcggtatgtggggggagagtttcaaaagcaatattagcaatgggactatgaacacaccaaaccacataataataccgaataatcagaaactagacaacaacgtgtcagaggatacttcccatggaacagcaggaactcctcacatgttcgatcaagaagcttcaacgtctagacatcccgataagatacaaagacggcttgctcaaaaccgcgaggctgctaggaaaagtcgcttgcgcaagaaggcttatgttcagcaactggaaacaagcaggttgaagctaattcaattagagcaagaactcgatcgtgctagacaacagggattctatgtaggaaacggaatagatactaattctctcggtttttcggaaaccatgaatccagggattgctgcatttgaaatggaatatggacattgggttgaagaacagaacagacagatatgtgaactaagaacagttttacacggacacattaacgatatcgagcttcgttcgctagtcgaaaacgccatgaaacattactttgagcttttccggatgaaatcgtctgctgccaaagccgatgtcttcttcgtcatgtcagggatgtggagaacttcagcagaacgattcttcttatggattggcggatttcgaccctccgatcttctcaaggttcttttgccacattttgatgtcttgacggatcaacaacttctagatgtatgcaatctaaaacaatcgtgtcagcaagcagaagacgcgttgactcaaggtatggagaagctgcaacacaccttgcggaccgttgcagcgggacaactcggtgaaggaagttacattcctcaggtgaattctgctatggatagattagaagctttggtcagtttcgtaaatcaggctgatcacttgagacatgaaacattgcaacaaatgtatcggatattgacaacgcgacaagcggctcgaggattattagctcttggtgagtattttcaacggcttagagccttgagctcaagttgggcaactcgacatcgtgaaccaacgtaggtttgagttattttgtaacaaccaaatgaagaaaatggaaagacctcaaaaatgaagaatgagtgcatctgaaaacagaggactactctgaataaatagaggggttgctgctgatatttatttttactctgcggcggaattagaaaatttgaaaaacatcatgtattgataagttgtaaatatcagaaaaaggtgggggtgcaaaaatttgtactttttagcttttgaaagaggcaagttt

SEQ ID NO: 192 - protein, 367 aa, Arabidopsis thaliana
  G554 polypeptide
MNSTSTHFVPPRRVGIYEPVHQFGMWGESFKSNISNGTMNTPNHIIIPNNQKLDNNVSEDTSHGTAGTPHMFDQEASTSRHPDKIQRRLAQNREAARKSRLRKKAYVQQLETSRLKLIQLEQELDRARQQGFYVGNGIDTNSLGFSETMNPGIAAFEMEYGHWVEEQNRQICELRTVLHGHINDIELRSLVENAMKHYFELFRMKSSAAKADVFFVMSGMWRTSAERFFLWIGGFRPSDLLKVLLPHFDVLTDQQLLDVCNLKQSCQQAEDALTQGMEKLQHTLRTVAAGQLGEGSYIPQVNSAMDRLEALVSFVNQADHLRHETLQQMYRILTTRQAARGLLALGEYFQRLRALSSSWATRHREPT

SEQ ID NO: 193 - DNA, 1360 bp, Arabidopsis thaliana
  G555
caaaagtagtaacctttgttggtgattgatactatatctgttgtgggttttagacaaagaccacgtctttgcagttgtagattggaattttccggatctttctctaaatcgctttttctccgagcaacttttgtttggggttaagctcaaagaatccgttcttttcagtctttactccatctagggtaccacgattggatcggtttttatctgatgatttagtaacagagattttgaagaaaaagaaaaatgggagatactagtccaagaacatcagtctcaacagatggagacactgatcataataacctaatgttcgatgaagggcatttgggtatcggtgcttctgattctagtgaccgttcaaagagtaaaatggatcaaaagacgcttcgtaggctcgctcaaaaccgtgaggctgcaaggaaaagcagattgaggaagaaagcatatgttcagcagctagagaacagtcgattgaagctaacacaacttgagcaggagctacaaagagcacggcaacagggtgtctttatctcaagctctggagaccaagcccattctaccgctggagatggggcaatggcatttgatgtagaatacagacgatggcaggaagataaaaacagacagatgaaggagctgagttctgctatagattctcacgcgactgattctgagcttcggataattgtagatggagtaatagctcactatgaggagctttacaggataaaaggcaacgcagctaagagtgatgtcttccatttattatcagggatgtggaaaaccccagctgagagatgtttcttgtggctcggcggtttccgttcatcagaacttctcaagcttatagcgtgtcagttggagcccttgacagaacaacaatcgctagacataaataacttgcaacagtcaactcagcaagcagaagatgctttgtctcaagggatggacaacttacagcaatcactcgctgatactttatcgagtgggactctcggttcaagttcatcagggaatgtagctagctacatgggtcagatggccatggcgatggggaagttaggtacccttgaaggatttatccgccaggctgataacttaaggctacaaacatatcaacagatggtgagactattaacaacccgacaatcggctcgtgctctccttgcagtacacaattatacattgcggttacgtgctcttagctctctatggcttgccagaccaagagagtgaaccatgactctattatacttcaacgaaggtccagaaaatttgagattcttagcataagatttgacgactttagacacgtagctcgtatacaagattatgattatactgttttgtgttg

SEQ ID NO: 194 - protein, 330 aa, Arabidopsis thaliana
  G555 polypeptide
MGDTSPRTSVSTDGDTDHNNLMFDEGHLGIGASDSSDRSKSKMDQKTLRRLAQNREAARKSRLRKKAYVQQLENSRLKLTQLEQELQRARQQGVFISSSGDQAHSTAGDGAMAFDVEYRRWQEDKNRQMKELSSAIDSHATDSELRIIVDGVIAHYEELYRIKGNAAKSDVFHLLSGMWKTPAERCFLWLGGFRSSELLKLIACQLEPLTEQQSLDINNLQQSTQQAEDALSQGMDNLQQSLADTLSSGTLGSSSSGNVASYMGQMAMAMGKLGTLEGFIRQADNLRLQTYQQMVRLLTTRQSARALLAVHNYTLRLRALSSLWLARPRE

SEQ ID NO: 195 - DNA, 1457 bp, Arabidopsis thaliana
  G556
cttttttgaagcccttttgacacaaaagaccagaacaagttgaagaaatatgaatacaacctcgacacattttgttccaccgagaaggtttgaagtttacgagcctctcaaccaaatcggtatgtgggaagaaagtttcaagaacaatggagacatgtatacgcctggctctatcataatcccgactaacgaaaaaccagacagcttgtcagaggatacttctcatgggacagaaggaactcctcacaagtttgaccaagaggcttccacatctagacatcctgataagatacagagaaggctagcacagaatcgagaggcagctaggaaaagtcgtttgcgcaagaaagcttatgttcagcagctagagactagccggttaaagctaattcatttagagcaagaactcgatcgtgctagacaacagggtttctatgtggggaacggagtagataccaatgctcttagtttctcagataacatgagctcagggattgttgcatttgagatggaatatggacattgggtggaagaacagaacaggcaaatatgtgaactaagaacggttttacatggacaagttagtgatatagagcttcgttctctagtcgagaatgccatgaaacattactttcaactcttccgaatgaagtcagccgctgcaaaaatcgatgttttctatgtcatgtccggaatgtggaaaacttcagcagagcggtttttcttgtggataggcggatttagaccctcagagcttctcaaggttctgttaccgcattttgatcctttgacggatcaacaacttttggatgtatgtaatctgaggcaatcatgtcaacaatcagaagatgcgttatcccaaggtatggagaaactgcaacatacattagcagagagtgtagcagccgggaaacttggtgaaggaagttatattcctcaaatgacttgtgctatggagagattggaggctttggtcagctttgtaaatcaagctgatcatctgagacatgagacattgcaacagatgcatcggatcttaaccacgcgacaagcggctagaggtttgttagcattaggggagtatttccaaaggcttcgagctttgagttcgagttgggcggctaggcaacgtgaaccaacgtaattaaggtgtttagatgtcaagaaaggtttgagaccttaacaatcaagaatggagtttgctggtgagtggatttttgggtcaagaacaagagcaataacacaagctgctgtgtgatgatgaatcttgtcttgcggctaaaggaaatgtttgaggaaagttgtacatatgatcagcaacgtaaagtttatagctttttagaaaccaacttttcgatggttgttcttttttttttgtatgtaatattatagataagcttgtggtatatatgattttaatgtgacattacgaacttgatttataaccatggtaaaat

SEQ ID NO: 196 - protein, 364 aa, Arabidopsis thaliana
  G556 polypeptide
MNTTSTHFVPPRRFEVYEPLNQIGMWEESFKNNGDMYTPGSIIIPTNEKPDSLSEDTSHGTEGTPHKFDQEASTSRHPDKIQRRLAQNREAARKSRLRKKAYVQQLETSRLKLIHLEQELDRARQQGFYVGNGVDTNALSFSDNMSSGIVAFEMEYGHWVEEQNRQICELRTVLHGQVSDIELRSLVENAMKHYFQLFRMKSAAAKIDVFYVMSGMWKTSAERFFLWIGGFRPSELLKVLLPHFDPLTDQQLLDVCNLRQSCQQSEDALSQGMEKLQHTLAESVAAGKLGEGSYIPQMTCAMERLEALVSFVNQADHLRHETLQQMHRILTTRQAARGLLALGEYFQRLRALSSSWAARQREPT

SEQ ID NO: 197 - DNA, 1294 bp, Arabidopsis thaliana
  G568
gaccggctaaagtcaagaacctctctctgagctctcaccactttctctctctactccctctctgcgtgtaggatactactagacaattgacaaccaaagactaaagctgtgttgttggttcacttctgttctcttttccaatgttgtcatcagctaagcatcagagaaaccatagactctctgctacaaacaagaaccagactctcaccaaagtttcttccatttcatcctcatcaccatcgtcttcttcttcatcatcatcaacctcatcatcatctcctttaccttctcaagactctcaagcccagaagagatctcttgtcaccatggaagaagtttggaatgacatcaaccttgcttccatccaccacctaaaccgacacagccctcatccacaacacaaccacgagccaaggttcaggggccaaaaccaccacaaccaaaaccctaactcaatcttccaagattttctcaaaggatctttgaaccaggaaccagcacccacaagccagaccacgggttctgcgcctaatggcgattccaccacggtcactgttctttacagctctccttttccacctcctgcaactgttctgagcttgaattccggcgctggcttcgagtttctcgataaccaagatcctcttgttacctcaaactctaatcttcatacccaccatcacctctcaaacgctcatgccttcaacacctctttcgaggctctggttccatccagttcttttggtaagaaaagaggccaagattccaatgaaggttcagggaatagaagacataagcgtatgatcaagaacagagaatctgcagctcgttcccgcgctaggaaacaggcttatacaaacgagttagaacttgaagttgctcacttgcaggcagaaaatgcaagactcaagagacaacaagatcaaaaaatggctgcagcaattcagcaacccaaaaagaacacacttcaacggtcttccacagctccattttgagaaatctacaagtccttgtttctcttttggggattgagattgtctcatgaagaagtgaaaaaatggcaaaagtttgtacccttttttattagctataagtataactaagcctaaaattgtagaactaagatattgtaggggaaaaaagaagatgtaaaacaaaagacccggaaagagaaaaggatctttcaatttcctaaggcacaggaacacctgtcctgggtcctctcttaatgttctgtcgttttcctatgcaaacccttttttcacttctgtactaacttatacttgtattcttg

SEQ ID NO: 198 - protein, 284 aa, Arabidopsis thaliana
  G568 polypeptide
MLSSAKHQRNHRLSATNKNQTLTKVSSISSSSPSSSSSSSSTSSSSPLPSQDSQAQKRSLVTMEEVWNDINLASIHHLNRHSPHPQHNHEPRFRGQNHHNQNPNSIFQDFLKGSLNQEPAPTSQTTGSAPNGDSTTVTVLYSSPFPPPATVLSLNSGAGFEFLDNQDPLVTSNSNLHTHHHLSNAHAFNTSFEALVPSSSFGKKRGQDSNEGSGNRRHKRMIKNRESAARSRARKQAYTNELELEVAHLQAENARLKRQQDQKMAAAIQQPKKNTLQRSSTAPF

SEQ ID NO: 199 - DNA, 2290 bp, Arabidopsis thaliana
  G577
aaaaacagactgagagagagagagagagagtgtgttgttggccatgggatgcacggcctccaagctcgacagtgaggatgctgtccgtcgctgcaaggagcggcgccgtcttatgaaggacgccgtctacgctcgtcaccatctcgccgccgctcactctgactactgccgctcccttcgtctcactggctctgccctctcctccttcgccgccggcgagcccctctccgtctccgagaatactcccgctgtttttctccgcccttcctccagtcaggacgcgccacgtgtcccttcttcccattccccagaaccccctcctccgcccatccgcagcaagcctaagcctactaggcctaggaggcttccacacattctctccgactcctctccttcttcctctcctgccaccagtttctatcccactgctcaccagaactctacttactctcgctctccatctcaagcttcctctgtctggaactgggagaatttctaccctccctctccccccgactccgagtacttcgaacgcaaagctcgccagaaccacaagcaccgtcctccttccgactacgacgccgaaactgaaagatccgaccacgattactgccactcacggagagatgccgccgaggaagttcactgcagcgagtggggcgacgaccacgaccgtttcactgccacctcttcgtccgacggagatggggaggtcgaaactcacgtttccagatccggtattgaagaagagcctgtgaaacaaccacatcaagacccaaatggcaaagagcactctgaccatgttaccacttcttccgactgctacaagaccaaattggtggtaaggcacaagaatttgaaggagatccttgacgccgttcaagactacttcgacaaggctgcctccgctggggaccaggtctccgccatgcttgagatcggccgggctgagctcgaccgcagcttcagcaagctgaggaagacggtgtatcattcaagcagtgtgttcagcaacttgagcgcaagctggacctcaaaacccccattggcagtcaaatacaagctcgatgcatctaccctgaatgatgaacaaggcggcctcaagagcctctgctccactctagaccgactcctcgcttgggaaaagaagctttatgaggatgtcaaggcaagagaaggagttaagattgagcacgagaagaagctgtctgcgctgcagagtcaggagtataagggaggtgatgaatccaagctagacaagactaaaacttccataaccagactgcaatcactcatcattgtttcttcagaagctgttttaaccacgtctaatgccattctccgcctccgggacactgaccttgtccctcagcttgttgaactctgccacggattaatgtacatgtggaagtcaatgcacgagtatcacgaaatccagaacaacatcgtgcaacaagtccgtggcctgatcaaccaaacagagagaggtgagtcaacatcagaggtacaccggcaggtgacgcgggacctagagtcagctgtgtccttgtggcattcgagcttctgtcgcatcattaaattccagagggagttcatatgctctctccacgcatggttcaagctgagcctggttcccctgagcaacggagacccaaagaaacagcggccagactcatttgccttgtgcgaggagtggaagcagagcctggaacgggtgcctgacacagtggcgtcagaagccataaagagctttgtaaacgtggtacatgtgatatcaataaagcaggcggaagaggtgaagatgaagaaacgcacggagagtgcaggaaaggagctggagaagaaagcatcctcactgaggagcatagagaggaagtactaccaggcatactcgacggttgggataggccctggaccggaggtgttggactcacgggacccgctatctgagaagaaatgtgagctggcggcatgtcagaggcaggtggaggatgaggtaatgaggcacgtgaaggctgtggaggtgacacgagctatgactctcaacaatctacaaaccggcctgcccaatgtattccaggccttgaccagcttctcatctctcttcactgaatctctccagactgtctgttctcgttcctactccatcaactgattatgtccaagtttctcatttatttttaagctctcattacgttggtatcatgtaaatttgaggattgattaaattgagtcttgtggttttgtgaggactcacaatctttctcatttaaaaaaaaaaaaaaaaaaa

SEQ ID NO: 200 - protein, 703 aa, Arabidopsis thaliana
  G577 polypeptide
MGCTASKLDSEDAVRRCKERRRLMKDAVYARHHLAAAHSDYCRSLRLTGSALSSFAAGEPLSVSENTPAVFLRPSSSQDAPRVPSSHSPEPPPPPIRSKPKPTRPRRLPHILSDSSPSSSPATSFYPTAHQNSTYSRSPSQASSVWNWENFYPPSPPDSEYFERKARQNHKHRPPSDYDAETERSDHDYCHSRRDAAEEVHCSEWGDDHDRFTATSSSDGDGEVETHVSRSGIEEEPVKQPHQDPNGKEHSDHVTTSSDCYKTKLVVRHKNLKEILDAVQDYFDKAASAGDQVSAMLEIGRAELDRSFSKLRKTVYHSSSVFSNLSASWTSKPPLAVKYKLDASTLNDEQGGLKSLCSTLDRLLAWEKKLYEDVKAREGVKIEHEKKLSALQSQEYKGGDESKLDKTKTSITRLQSLIIVSSEAVLTTSNAILRLRDTDLVPQLVELCHGLMYMWKSMHEYHEIQNNIVQQVRGLINQTERGESTSEVHRQVTRDLESAVSLWHSSFCRIIKFQREFICSLHAWFKLSLVPLSNGDPKKQRPDSFALCEEWKQSLERVPDTVASEAIKSFVNVVHVISIKQAEEVKMKKRTESAGKELEKKASSLRSIERKYYQAYSTVGIGPGPEVLDSRDPLSEKKCELAACQRQVEDEVMRHVKAVEVTRAMTLNNLQTGLPNVFQALTSFSSLFTESLQTVCSRSYSIN

SEQ ID NO: 201 - DNA, 978 bp, Arabidopsis thaliana
  G578
atgcatagtttgaatgaaacagtaattcctgatgttgattacatgcagtctgatagagggcatatgcatgctgctgcctctgattccagtgatcgatcaaaggataagttggatcaaaagacccttcgtaggcttgctcaaaatcgtgaggcagcaagaaaaagcagattgaggaagaaggcgtatgttcagcagctggaagatagtcgattaaagctgactcaagttgagcaggagctgcaaagagcaagacagcagggagttttcatctcaagttcaggagaccaagctcattctactggtggcaatggtggggctttggcatttgatgcagaacactcacgatggcttgaagaaaagaacaggcaaatgaacgagctgagatctgccctgaatgctcatgcaggtgatactgagctccggataattgtggatggagtgatggctcactatgaggagcttttcaggattaagagcaatgcatctaagaatgatgtcttccacttgttatctggaatgtggaaaacaccagctgagcgatgtttcttgtggcttggcgggttcccgtcatccgaacttctcaagcttcttgcgaatcagctagagcccatgacagaacgacaggtaatgggcatcaatagcttgcagcagacgtcgcagcaggcagaagatgctttatctcaagggatggagagtttacagcaatccctagctgatactttatccagtggaactcttggttccagttcatcggataatgtcgcgagctacatgggtcagatggccatggcaatgggcaagttaggcaccctcgaaggattcatacgccaggctgataacttgaggctgcaaacactacaacagatgcttcgagtattaacaacacgtcagtcagctcgtgctcttcttgctatacacgattattcatctcgattacgtgctcttagttccttgtggcttgcccggccaagagagtga

SEQ ID NO: 202 - protein, 325 aa, Arabidopsis thaliana
  G578 polypeptide
MHSLNETVIPDVDYMQSDRGHMHAAASDSSDRSKDKLDQKTLRRLAQNREAARKSRLRKKAYVQQLEDSRLKLTQVEQELQRARQQGVFISSSGDQAHSTGGNGGALAFDAEHSRWLEEKNRQMNELRSALNAHAGDTELRIIVDGVMAHYEELFRIKSNASKNDVFHLLSGMWKTPAERCFLWLGGFPSSELLKLLANQLEPMTERQVMGINSLQQTSQQAEDALSQGMESLQQSLADTLSSGTLGSSSSDNVASYMGQMAMAMGKLGTLEGFIRQADNLRLQTLQQMLRVLTTRQSARALLAIHDYSSRLRALSSLWLARPRE

SEQ ID NO: 203 - DNA, 1557 bp, Arabidopsis thaliana
  G629
cgaaatgaaaaaattctctgtattaccagaaacgtgtttcataagcatctttaactcttcagctctcaaattcttcatgaatatctctgcttatcggatcaagtgagagcaaatgcaatttttaagagccagctattggatctataactgaagaggatatatatagagatgatgagttcttcttctccaacacaacttgcatctttaagagacatgggaatctatgagccatttcaacaaattgtcggttggggaaatgttttcaaatctgatatcaatgatcatagtcccaatactgctacttcctctattattcaggttgatcctagaattgatgatcacaacaacaacatcaagataaattatgattcttctcataaccagatcgaagcagaacaaccttctagtaatgataatcaagatgatgatggcaggattcatgataagatgaaacggcgtttagcgcagaaccgagaagcggctcgcaaaagtcgtttgagaaagaaggcttatgttcagcagttagaggaaagccggttaaagttatcgcagttagagcaagaactcgaaaaggttaagcagcagggccatttaggaccatctgggagtattaacacagggattgcatcatttgagatggaatattcacactggctacaagaacaaagcagaagagttagcgaactacgaacagcgcttcaatctcatataagcgacatagaactcaagatgctagtagagagttgcttgaaccattacgctaatcttttccgaatgaaatccgatgcagcaaaagccgatgttttctacttgatatcgggaatgtggcgaacttcaaccgaaagattcttccaatggattggagggtttcgtccatccgaacttttaaacgttgtgatgccttatcttcaaccattaacggatcaacaaatcttggaagtgagaaacctccaacaatcatcacaacaagcagaggatgctctgtctcaagggattgataaacttcaacagagtttagctgaaagcattgtgattgatgcggttatcgagtccacgcattatcccactcacatggctgcagctatagagaatcttcaagcattagaaggatttgtgaatcaagcagatcatctgaggcaacaaactttgcaacaaatggcgaagatcttaacgacaagacaatcggctcgaggtttactagctttaggagagtatcttcatagacttcgtgctcttagttctctttgggcagctcgtccacaagaaccaacttaaaagaggaacttattaaaactttaaaaacaagaaacagcagaatcaaaagtcttgaagaagcatactcatcacaaagcttggaaggatgttttaaaaaagatctttgttaattaagtagagtgagattctcttgattagaactttatggtttttgctttatgaagtatctctccagagaagattgtaaatttgggttgaaactttgtaatatattaagatccaccaaataagtttgaaatctgagcaatttgataataaaaaaaaaaaaaaaaaaaaaaaaaa

SEQ ID NO: 204 - protein, 368 aa, Arabidopsis thaliana
  G629 polypeptide
MMSSSSPTQLASLRDMGIYEPFQQIVGWGNVFKSDINDHSPNTATSSIIQVDPRIDDHNNNIKINYDSSHNQIEAEQPSSNDNQDDDGRIHDKMKRRLAQNREAARKSRLRKKAYVQQLEESRLKLSQLEQELEKVKQQGHLGPSGSINTGIASFEMEYSHWLQEQSRRVSELRTALQSHISDIELKMLVESCLNHYANLFRMKSDAAKADVFYLISGMWRTSTERFFQWIGGFRPSELLNVVMPYLQPLTDQQILEVRNLQQSSQQAEDALSQGIDKLQQSLAESIVIDAVIESTHYPTHMAAAIENLQALEGFVNQADHLRQQTLQQMAKILTTRQSARGLLALGEYLHRLRALSSLWAARPQEPT

SEQ ID NO: 205 - DNA, 341 bp, Arabidopsis thaliana
  G682
acatggataaccatcgcaggactaagcaacccaagaccaactccatcgttacttcttcttctgaaggaacagaagtgagtagtcttgagtgggaagttgtgaacatgagtcaagaagaagaagatttggtctctcgaatgcataagcttgtcggtgacaggtgggaactgatagctgggaggatcccaggaagaaccgctggagaaattgagaggttttgggtcatgaaaaattgaaaagtgatcaatatatctctatagtttcactgattgtttcgattatattccgttgtattttaaatttaccaactctgttataagaagaaaactttcttaaatccc

SEQ ID NO: 206 - protein, 77 aa, Arabidopsis thaliana
  G682 polypeptide
MDNHRRTKQPKTNSIVTSSSEGTEVSSLEWEVVNMSQEEEDLVSRMHKLVGDRWELIAGRIPGRTAGEIERFWVMKN

SEQ ID NO: 207 - DNA, 1182 bp, Arabidopsis thaliana
  G730
ctttttgaaataaataacattatacccctcctttttcccataaaattcatcaagattatctcaaaatcattcaccaattctctcttcttatggagcttttcccttcacaacctgacttgtacttgaagatcagccgaagaagagaagaagaacaagaaaaagaaagtcaagaactacaagaacaagaagtcgaaaggagattagggtttcagagtaaagcctcagatttagacaacaagtcttcaaataatctcatccacactctccagttcacttcaaacaatgaagccaccaagattaatagtaatcaagaacacaaggaatctctcgatcaagacttgagatctatttttatgatgagaccaataagaggaatccctctttaccagaatcaagtccttgaccactactactactcatctacctctcccaatcctttcttcttcagtgaagtcaacggtcaacatgctagtcgtcgcttaatcacaaaccctaattgtagttttaatctccacaaccgtcatcggcgtcaagctcaaccgcagccgccaagattcaccgccaaaagaggagtaagggctccaaggatgcggtggacgacgaccctccacgcccattttgtacacgctgttcaattattgggtggtcatgaaagagcaaccccaaaatcagtacttgagctgatggatgtgcaagatctcacattggctcatgttaaatcccatctacagatgtatcgaaccatcaagtctactgaaaaacctacaacgtcatcagggcagtcagattgtgagaatggatcacaagtaaacagtgagagagaagcaagaaatctcacgggtctatggaataactcctcaagtgaagctcggttccagttgaaggcaaaggcatcatcaggtgtagacatttcatccaatgagaatgaatggaagaatcgaagatgtccaagcaacgaacggttgtcgtcagattcgtcaagccttacagggacaagaccagagactgaaactcccaatcttgatttcactttagctacaccaaacctctctccctaattttcttatatatactaaaaatacatattatctgttaaaaattatataaatctcaaacttaaaagtttatgcttttgaaaaaatatatatgaaatgacgtttatttcttccttaaaaaaaaaaa

SEQ ID NO: 208 - protein, 322 aa, Arabidopsis thaliana
  G730 polypeptide
MELFPSQPDLYLKISRRREEEQEKESQELQEQEVERRLGFQSKASDLDNKSSNNLIHTLQFTSNNEATKINSNQEHKESLDQDLRSIFMMRPIRGIPLYQNQVLDHYYYSSTSPNPFFFSEVNGQHASRRLITNPNCSFNLHNRHRRQAQPQPPRFTAKRGVRAPRMRWTTTLHAHFVHAVQLLGGHERATPKSVLELMDVQDLTLAHVKSHLQMYRTIKSTEKPTTSSGQSDCENGSQVNSEREARNLTGLWNNSSSEARFQLKAKASSGVDISSNENEWKNRRCPSNERLSSDSSSLTGTRPETETPNLDFTLATPNLSP

SEQ ID NO: 209 - DNA, 1824 bp, Arabidopsis thaliana
  G761
ggggccgaccggccgcccgggcaggtctaggttcaaaaggactcacaagagagagatagtatgattgatagggaaagagagagagatgaaagaaagtaaaatatataatagattattaggacacgagtgtcatcttttgatttgtgtcttgtgtgctctctctttcttctcttcctcgaatgatcatctttatataaccctactctctttctcttttcccattctttcatatcattctccctttctctctcgggatctgatctctctttccagtaacctattcccgaggagcactgtcaaatcttgtccactctttgatcttatctcgatctctttctctttctagtcttgtgtagtcttcaaacttgtgatgttatctatatagtaatcacgagagagaatcatacaatagctgaaacataaagctttcttagaagctttaaaaaggtctcatctggattatcctgtttaatttctagagtttcttcaggcagattattaaccgatcaagaagacaaacatgaattcattttcccacgtccctccgggttttagatttcacccgacagatgaagaacttgtagactactacctgaggaaaaaagtcgcatcgaagagaatagaaattgatttcataaaggacattgatctttacaagattgagccatgggaccttcaagagttgtgcaaaattgggcatgaagagcagagtgattggtacttctttagccataaagacaagaagtatcccacagggactcgaaccaatagagcaacaaaagcagggttttggaaagccaccggaagagataaggctatctatttgaggcatagtctaattggcatgaggaaaacacttgtgttttacaagggaagagccccaaatggacaaaagtctgattggatcatgcacgaataccgcttagaaaccgatgaaaacggaactcctcaggaagaaggatgggttgtgtgtagggttttcaagaagagattggctgcagttagacgaatgggagattacgactcatccccttcacattggtacgatgatcaactttcttttatggcctccgagctcgagacaaacggtcaacgacggattctccccaatcatcatcagcagcagcagcacgagcaccaacaacatatgccatatggcctcaatgcatctgcttacgctctcaacaaccctaacttgcaatgcaagcaagagctagaactacactacaaccacctgcaatcaaatatcgcgcatgaggaacaattgaatcaaggaaatcagaacttcagctctctatacatgaacagcggcaacgagcaagtgatggaccaagtcacagactggagagttctcgataaatttgttgcttctcagctaagcaacgaggaggctgccacagcttctgcatctatacagaataatgccaaggacacaagcaatgctgagtaccaagttgatgaagaaaaagatccgaaaagggcttcagacatgggagaagaatatactgcttctacttcttcgagttgtcagattgatctatggaagtgagctgaaagagaagacatataaatgcatatatacatatatatatatacgtacacacgaacactaatcaagtgtagatgatgatgatggtacagatttatatttgctttgattgattcttactacattattgaacttatgtcatatgcatatatacattgcgtatctatgcatatttatacttgtactcaatatgattaaccatatataaactctaatctaaatgtaactccaatattttttaaatagacaattgtctcttcttattagaaaaaaaa

SEQ ID NO: 210 - protein, 342 aa, Arabidopsis thaliana
  G761 polypeptide
MNSFSHVPPGFRFHPTDEELVDYYLRKKVASKRIEIDFIKDIDLYKIEPWDLQELCKIGHEEQSDWYFFSHKDKKYPTGTRTNRATKAGFWKATGRDKAIYLRHSLIGMRKTLVFYKGRAPNGQKSDWIMHEYRLETDENGTPQEEGWVVCRVFKKRLAAVRRMGDYDSSPSHWYDDQLSFMASELETNGQRRILPNHHQQQQHEHQQHMPYGLNASAYALNNPNLQCKQELELHYNHLQSNIAHEEQLNQGNQNFSSLYMNSGNEQVMDQVTDWRVLDKFVASQLSNEEAATASASIQNNAKDTSNAEYQVDEEKDPKRASDMGEEYTASTSSSCQIDLWK

SEQ ID NO: 211 - DNA, 923 bp, Arabidopsis thaliana
  G798
gcatcacttcccttaaagcttcaaccttctccgatatgccgacgtcgactccggtgaaccacggcgaatagctatgaaacctaacggcgtaacagttccgatttctgaccagcaagaacagcttccatgtcctcgttgtgactcatccaacactaagttctgttactacaacaactacaacttctctcagcctcgtcacttctgcaaagcttgtcgtcgttactggactcacggtggtactctccgtgacgttcctgtcggtggtggtactcgtaaaagcgcgaaacgttcccgcacttgctcgaactcttcttcctcctctgtttctggtgtcgtctctaactctaacggtgttccgttacaaacgacgcctgttctcttccctcagtcgtcaatctctaacggcgttactcacacagtaactgaaagcgacggaaagggaagtgctttatctctctgtggaagtttcacctccactctgttgaaccataacgctcgtgcgacggctacgcatggatccggttcggttattggtatcggaggttttggaatcggactcgggtcgggttttgatgacgtcagctttggactcggaagagcgatgtggccgttttcaactgttggtactgcgacaacgacgaatgttgggagtaacggtggtcatcacgctgttccaatgccagccacgtggcagttcgagggtttagagagcaacgctggtggtggatttgtctccggtgagtactttgcgtggccggatctttccatcacaactccgggaaactcactcaaatgagaaaagcttctgtcttcatcaaagggcttcaaagtctcttcctttttttagtctctattggtgatgttgatctcttagtttgtgtcttgtcaatttagaaacttgtcttcggaaactagaaaacaga

SEQ ID NO: 212 - protein, 240 aa, Arabidopsis thaliana
  G798 polypeptide
MKPNGVTVPISDQQEQLPCPRCDSSNTKFCYYNNYNFSQPRHFCKACRRYWTHGGTLRDVPVGGGTRKSAKRSRTCSNSSSSSVSGVVSNSNGVPLQTTPVLFPQSSISNGVTHTVTESDGKGSALSLCGSFTSTLLNHNARATATHGSGSVIGIGGFGIGLGSGFDDVSFGLGRAMWPFSTVGTATTTNVGSNGGHHAVPMPATWQFEGLESNAGGGFVSGEYFAWPDLSITTPGNSLK

SEQ ID NO: 213 - DNA, 648 bp, Arabidopsis thaliana
  G900
atggggaagaagaagtgcgagttatgttgtggtgtagcgagaatgtattgtgagtcagatcaagcgagtttatgttgggattgtgacggtaaagttcacggagctaattttctggtggcgaaacacatgcgttgtcttctatgtagcgcgtgtcagtcacacacgccttggaaagcttctgggctgaatcttggcccaactgtttctatctgtgagtcttgtttagctcgtaagaagaataacaacagctccctcgccgggagggatcagaatcttaaccaagaagaagagatcattggttgtaacgacggagctgagtcttatgatgaggaaagcgatgaggatgaagaagaagaagaagtggagaatcaggttgttccggctgcggtggagcaagaacttccggtggtgagttcgtcgtcttcggttagtagtggtgaaggagatcaggtggtgaaaaggacgagacttgatttggatcttaacctctccgatgaggagaaccaatctagaccattgaaaagattatcgagagacgaaggtttgtcaagatcaactgttgtgatgaatagctcaatcgtgaaattacacggagggaggagaaaagcagagggatgtgatacatcatcgtcgtcttcgttttattga

SEQ ID NO: 214 - protein, 215 aa, Arabidopsis thaliana
  G900 polypeptide
MGKKKCELCCGVARMYCESDQASLCWDCDGKVHGANFLVAKHMRCLLCSACQSHTPWKASGLNLGPTVSICESCLARKKNNNSSLAGRDQNLNQEEEIIGCNDGAESYDEESDEDEEEEEVENQVVPAAVEQELPVVSSSSSVSSGEGDQVVKRTRLDLDLNLSDEENQSRPLKRLSRDEGLSRSTVVMNSSIVKLHGGRRKAEGCDTSSSSSFY

SEQ ID NO: 215 - DNA, 1022 bp, Arabidopsis thaliana
  G986
cattaaattggctcctgtgaacctaaatttatggactatgatcccaacaccaatccgttcgaccttcatttctccggtaaacttccgaaaagagaagtctcggcttcagcttctaaagttgtagagaagaaatggttagtgaaagatgagaagagaaatatgctacaagatgaaataaaccgggttaattcggagaacaagaagctaaccgaaatgttagcaagagtctgtgagaagtactatgctcttaataatcttatggaggagttgcagagtcgaaagagtcctgaaagtgttaactttcagaacaaacagctaacggggaaacgaaaacaagaacttgatgagtttgttagctccccaattggactcagtctcggaccaatcgagaacatcaccaacgataaagcgacggtttcaaccgcttactttgctgctgagaagtctgacacaagcttgactgtgaaagatggatatcaatggaggaaatacgggcaaaagattacgagagataatccatctcctagagcttacttcagatgctcgttttcaccgtcttgtctagtcaagaagaaggtgcaacgaagtgcagaagatccatctttcttggtagccacttacgaagggacacataaccacaccggaccacatgcaagtgtgtccaggacagtgaaacttgatctagttcaaggtgggcttgaaccagttgaggaaaagaaagagagagggacgattcaagaggttttggtgcaacaaatggcttcttcgttgaccaaagatcctaagttcactgcagctcttgcgactgctatttccgggagattgatagagcattcaagaacatgaaagttctctagaacatgtatatttctgttttgttctattttgttgctcattcctagtaaaaaggtaaagatttgtttgatcttgattaggaggcatagatgtcaattttaatgtgtgtgtatataattacatcaaatctaagtatccaaaaagggtcacccccattttatcttatg

SEQ ID NO: 216 - protein, 271 aa, Arabidopsis thaliana
  G986 polypeptide
MDYDPNTNPFDLHFSGKLPKREVSASASKVVEKKWLVKDEKRNMLQDEINRVNSENKKLTEMLARVCEKYYALNNLMEELQSRKSPESVNFQNKQLTGKRKQELDEFVSSPIGLSLGPIENITNDKATVSTAYFAAEKSDTSLTVKDGYQWRKYGQKITRDNPSPRAYFRCSFSPSCLVKKKVQRSAEDPSFLVATYEGTHNHTGPHASVSRTVKLDLVQGGLEPVEEKKERGTIQEVLVQQMASSLTKDPKFTAALATAISGRLIEHSRT

SEQ ID NO: 217 - DNA, 913 bp, Arabidopsis thaliana
  G1006
gataaatcaatcaacaaaacaaaaaaaactctatagttagtttctctgaaaatgtacggacagtgcaatatagaatccgactacgctttgttggagtcgataacacgtcacttgctaggaggaggaggagagaacgagctgcgactcaatgagtcaacaccgagttcgtgtttcacagagagttggggaggtttgccattgaaagagaatgattcagaggacatgttggtgtacggactcctcaaagatgccttccattttgacacgtcatcatcggacttgagctgtctttttgattttccggcggttaaagtcgagccaactgagaactttacggcgatggaggagaaaccaaagaaagcgataccggttacggagacggcagtgaaggcgaagcattacagaggagtgaggcagagaccgtgggggaaattcgcggcggagatacgtgatccggcgaagaatggagctagggtttggttagggacgtttgagacggcggaagatgcggctttagcttacgatatagctgcttttaggatgcgtggttcccgcgctttattgaattttccgttgagggttaattccggtgaacctgacccggttcggatcacgtctaagagatcttcttcgtcgtcgtcgtcgtcgtcctcttctacgtcgtcgtctgaaaacgggaagttgaaacgaaggagaaaagcagagaatctgacgtcggaggtggtgcaggtgaagtgtgaggttggtgatgagacacgtgttgatgagttattggtttcataagtttgatcttgtgtgttttgtagttgaatagttttgctataaatgttgaggcaccaagtaaaagtgttcccgtgatgtaaattagttactaaacagagccatatatcttcaatcaaaaaaaaaaaaaaaa

SEQ ID NO: 218 - protein, 243 aa, Arabidopsis thaliana
  G1006 polypeptide
MYGQCNIESDYALLESITRHLLGGGGENELRLNESTPSSCFTESWGGLPLKENDSEDMLVYGLLKDAFHFDTSSSDLSCLFDFPAVKVEPTENFTAMEEKPKKAIPVTETAVKAKHYRGVRQRPWGKFAAEIRDPAKNGARVWLGTFETAEDAALAYDIAAFRMRGSRALLNFPLRVNSGEPDPVRITSKRSSSSSSSSSSSTSSSENGKLKRRRKAENLTSEVVQVKCEVGDETRVDELLVS

SEQ ID NO: 219 - DNA, 1057 bp, Arabidopsis thaliana
  G1040
ctttgatctccactatttaagtagacaagaatcataaagaaaatagtgagatgatgatgttagagtcaagaaacagtatgagagcttcaaactcagtcccagatctgtctcttcagatcagtcttcctaactatcacgccggaaaacctcttcacggcggtgaccggagctccacaagcagtgattctggaagcagcctcagtgacctgagccatgagaacaacttcttcaacaaacctctcttgagcttaggatttgaccatcatcatcaaaggcgctcaaacatgttccaacctcaaatctacggtcgagatttcaagagaagctcatcatcaatggttggtcttaaacgaagcattcgtgctccaagaatgagatggacttctactcttcatgctcacttcgtccatgctgttcaacttcttggcggccatgaaagagcaacgcctaaatcagtgttggagctcatgaatgtgaaggatctaaccctagctcatgtcaagagtcacttgcagatgtatagaacagtgaaatgcactgataaaggatcaccaggagaaggaaaggtagagaaagaggcagagcagaggatagaggacaataataataatgaagaagctgatgaaggaactgacacaaattcgccaaactcatcatctgtgcaaaagacccaaagagcttcatggtcatcgacaaaggaagtatctaggagcatatctacacaagcatattctcacttgggaacaactcatcacactaaggccaatgaagagaaagaggataccaacattcatctcaatttggatttcacattgggcggcctagttgggggatggaatatgcggaaccctccagtgatttaacccttctcaagtgctaattgccttaagctacaacaaataagtcagcttaggttaccagttttaacataattttaacttgttttgatcatatgagcttcggaagaatcatattatcatcatatatgaacttctttccaagaatgttctatgagttttttgatatgtataatcaagagaatcgtttgaagtaaaaa

SEQ ID NO: 220 - protein, 270 aa, Arabidopsis thaliana
  G1040 polypeptide
MMMLESRNSMRASNSVPDLSLQISLPNYHAGKPLHGGDRSSTSSDSGSSLSDLSHENNFFNKPLLSLGFDHHHQRRSNMFQPQIYGRDFKRSSSSMVGLKRSIRAPRMRWTSTLHAHFVHAVQLLGGHERATPKSVLELMNVKDLTLAHVKSHLQMYRTVKCTDKGSPGEGKVEKEAEQRIEDNNNNEEADEGTDTNSPNSSSVQKTQRASWSSTKEVSRSISTQAYSHLGTTHHTKANEEKEDTNIHLNLDFTLGGLVGGWNMRNPPVI

SEQ ID NO: 221 - DNA, 715 bp, Arabidopsis thaliana
  G1047
caattttaaaccggtcattatgatgtctactgtaccggcctttacctttactgaaccgggtttggttaaccaattatcggatttccagaccggattcactccttgggaattgaactgctccgatctcttctctacaatccatctcgaaccggtcgtaccgagtccttgttctggtgaatccgatgccggttctgtcaaaattaacaccgattttaacggttttgacgaatcgtgtatcggttccatcaaaactaactccggttctgatgattccaaccttttccacggcgtaccgagtcctcaatccgacgaattggactcaaaaaacacgaaaatccgaagtaacgccacgaatcataaccggaacaaattgaaccggtcggttttgcaggtgactgacgaccgtaaacgcaaacggatggaatcaaaccgagaatcagcgaagcggtcgaggatgcgtaaacaaagacacattgataatttaaaagacgaagcaaatcgtctcggtttagaaaaccgggaactcgcaaaccggcttcgaattgttttgtacaacatcgcattaatgtgtacggacaacaatcagcttttgtcggaacaagagattctcagacggagattcttggagatgaggcagattttgattttcagacagcttcagctgaatccatcattgatcatcaatcatcatcatatgatttgaaagaaaaaaaaa

SEQ ID NO: 222 - protein, 227 aa, Arabidopsis thaliana
  G1047 polypeptide
MMSTVPAFTFTEPGLVNQLSDFQTGFTPWELNCSDLFSTIHLEPVVPSPCSGESDAGSVKINTDFNGFDESCIGSIKTNSGSDDSNLFHGVPSPQSDELDSKNTKIRSNATNHNRNKLNRSVLQVTDDRKRKRMESNRESAKRSRMRKQRHIDNLKDEANRLGLENRELANRLRIVLYNIALMCTDNNQLLSEQEILRRRFLEMRQILIFRQLQLNPSLIINHHHMI

SEQ ID NO: 223 - DNA, 1780 bp, Arabidopsis thaliana
  G1198
tcttttcaaattccaatcatttgatcaactaatcaagaattaattataagactttgcaatctctctccctctccctctccctagctagttctctcttgtgtttcttaactcgagcttctctcaatagtgattatcatctttttcatcatttcaagatttaatgtgttttgcagaaaagagactaatcaagaagagatatcatcaattgaagctgttttcttgagtagagatggcgaaccatagaatgagcgaagctacaaaccataaccacaatcatcatcttccttattcacttattcatggtctcaacaacaatcatccatcttctggtttcattaaccaagatggatcgtccagtttcgattttggagagctagaagaagcaattgttctgcaaggtgtcaagtataggaacgaggaagccaagccacctttattaggaggaggaggaggagctacgactctggagatgttcccttcgtggccaatcagaactcaccaaactcttcctactgagagttccaagtcaggaggagagagcagcgattcaggatcggctaatttctccggcaaagctgaaagtcaacaaccggagtctcctatgagtagcaaacatcatctcatgcttcaacctcatcataataacatggcaaactcaagttcaacatctggacttccttccacttctcgaactttagctcctcctaaaccttcggaagataagaggaaggctacaacttcaggcaaacagcttgatgctaagacgttgagacgtttggcccaaaatagagaagctgctcgcaaaagccgtcttaggaaaaaggcgtatgtgcaacagctagaatcaagtaggataaagctttcccaattggagcaagaacttcagcgagctcgttctcaggggctgttcatgggtggttgtggaccaccaggacctaacatcacttccggagctgcaatatttgacatggaatatgggagatggctagaggatgataaccggcatatgtcggagattcgaaccggtcttcaggctcatttatctgacaatgatttaaggttgatcgttgacggttacattgctcattttgatgagatattccgattaaaagccgtggcagcgaaagccgatgtttttcacctcatcattgggacatggatgtccccagccgaacgttgttttatttggatggctggtttccgtccatccgacctaatcaagatattggtgtcgcaaatggatctattgacggagcaacaactgatgggaatatatagcctacaacactcgtcgcaacaagcagaggaggctctctcgcaaggcctcgaacaacttcagcaatctctcatcgatactctcgccgcatctccagtcattgacggaatgcaacaaatggctgtcgctctcggaaagatctctaatctcgaaggctttatccgccaggctgataacttgaggcagcagaccgttcaccagctgaggcggatcttgaccgtccgacaagctgcacggtgtttcctagtcatcggagagtactatggacggctcagagctcttagctccctttggttgtcacgcccacgagagacactgatgagtgatgaaacctcttgtcaaacgacgacggatttgcagattgttcagtcatctcggaaccacttctccaatttctgaatggaatgaaactttgtataactaaaaggccaagtttcattgtctgtcgtaatttcacctatttcctttaaagttgtactagagaaaagataggatcttccttcg

SEQ ID NO: 224 - protein, 481 aa, Arabidopsis thaliana
  G1198 polypeptide
MANHRMSEATNHNHNHHLPYSLIHGLNNNHPSSGFINQDGSSSFDFGELEEAIVLQGVKYRNEEAKPPLLGGGGGATTLEMFPSWPIRTHQTLPTESSKSGGESSDSGSANFSGKAESQQPESPMSSKHHLMLQPHHNNMANSSSTSGLPSTSRTLAPPKPSEDKRKATTSGKQLDAKTLRRLAQNREAARKSRLRKKAYVQQLESSRIKLSQLEQELQRARSQGLFMGGCGPPGPNITSGAAIFDMEYGRWLEDDNRHMSEIRTGLQAHLSDNDLRLIVDGYIAHFDEIFRLKAVAAKADVFHLIIGTWMSPAERCFIWMAGFRPSDLIKILVSQMDLLTEQQLMGIYSLQHSSQQAEEALSQGLEQLQQSLIDTLAASPVIDGMQQMAVALGKISNLEGFIRQADNLRQQTVHQLRRILTVRQAARCFLVIGEYYGRLRALSSLWLSRPRETLMSDETSCQTTTDLQIVQSSRNHFSNF

SEQ ID NO: 225 - DNA, 963 bp, Arabidopsis thaliana
  G1264
atggttttctcatccgtctcaagctttttagatccaccaattaattggccacagtctgcgaatccaaataaccatcctcatcatcatcagctacaagaaaatggaagtttagttagtggccaccaccaagtactctctcaccacttcccacaaaaccctaaccctaaccaccaccatgttgagacagcagccgccaccaccgttgatccgagcagtctcaatggccaggcggctgagagagcgaggctagctaagaactctcagccgccagagggagccctaaagtgtcctcgatgtgactcagccaataccaagttctgttacttcaacaactacaacctcacgcagccacgccacttctgcaaagcttgccgtcgctactggacacgtggcggtgccttgaggaacgtacctgtcggtggtggctgccggaggaataagaagggtaaatccggaaattcaaagtcttcctcttcctctcagaacaagcagtcaacgtctatggtcaacgctacaagccctactaatactagtaatgtccagctccaaacaaatagccaattcccatttttgcccactctacaaaacctcactcaacttggtggtattggtttaaacttagccgccattaatggaaataatggtggaaatggtccggtcatgggtaacaacaacgagaataacctaatgacttctcttggatcatccagccactttgctttgttcgatcgaaccatgggattatataatttccctaacgaggtaaatatgggattatcttctattggtgctactagggtttctcaaactgctcaggtgaaaatggaggacaaccatttgggtaatataagccgcccggtttcggggttgacatctccagggaatcaatccaatcaatattggaccggtcaaggtctccccggttcttcatctaacgatcatcatcaccagcatcttatgtga

SEQ ID NO: 226 - protein, 320 aa, Arabidopsis thaliana
  G1264 polypeptide
MVFSSVSSFLDPPINWPQSANPNNHPHHHQLQENGSLVSGHHQVLSHHFPQNPNPNHHHVETAAATTVDPSSLNGQAAERARLAKNSQPPEGALKCPRCDSANTKFCYFNNYNLTQPRHFCKACRRYWTRGGALRNVPVGGGCRRNKKGKSGNSKSSSSSQNKQSTSMVNATSPTNTSNVQLQTNSQFPFLPTLQNLTQLGGIGLNLAAINGNNGGNGPVMGNNNENNLMTSLGSSSHFALFDRTMGLYNFPNEVNMGLSSIGATRVSQTAQVKMEDNHLGNISRPVSGLTSPGNQSNQYWTGQGLPGSSSNDHHHQHLM

SEQ ID NO: 227 - DNA, 911 bp, Arabidopsis thaliana
  G1277
attctaaagtcctcctctcggaaagtaagagactcaacttccgagccgccatggacgccggagtagcagtaaaagctgacgtggcagtcaaaatgaagagagaaagaccattcaaagggatcagaatgagaaaatgggggaaatgggttgcggagattcgagaacccaacaagcgttcaagactttggctcggctcttactctactcccgaagcggcggcgcgtgcatacgacacggctgtcttttacctcagaggaccaactgctacgctcaacttcccggagcttctgccgtgtacctccgccgaggatatgtcagcggcaacgatcaggaaaaaggcgacggaggtgggagctcaagtagatgcgataggggcgacggtggtgcagaacaacaaacgccgccgcgtttttagtcaaaagcgtgactttggcggcgggttattagagcttgttgacttgaacaagttacctgacccggaaaatctcgatgatgatttggtgggaaaatagactgaaaaataataataaaatatcttacaatggtggctgtagctatcgtacgcggaatgcttgggcttgtgttatatgactacgtggttacggaaagattcctctgtttcgtcattgtattaaaatttaatcccacaagtcaaacatactgtacattattcttaatttagtattttcttattaatatctatcatttgtttggtgaacaccagaatattagactattaatgtaacgagtttttaatatttcgatcataataacaccaagctagttaaaggttaatatcttgttacgaagtcttgagtaagttcaattgtcatatatatgtaacggaagaggttcgttcgggtcccaagtgaagtggatcaaaggtgacttcacataaaaaataaaaaaaa

SEQ ID NO: 228 - protein, 153 aa, Arabidopsis thaliana
  G1277 polypeptide
MDAGVAVKADVAVKMKRERPFKGIRMRKWGKWVAEIREPNKRSRLWLGSYSTPEAAARAYDTAVFYLRGPTATLNFPELLPCTSAEDMSAATIRKKATEVGAQVDAIGATVVQNNKRRRVFSQKRDFGGGLLELVDLNKLPDPENLDDDLVGK

SEQ ID NO: 229 - DNA, 912 bp, Arabidopsis thaliana
  G1309
cgtcgacctcttaattaagacgacttgagagagaaagaaagatacgtggaagatgaccaaatctggagagagaccaaaacagagacagaggaaagggttatggtcacctgaagaagaccagaagctcaagagtttcatcctctctcgtggccatgcttgctggaccactgttcccatcctagctggattgcaaaggaatgggaaaagctgcagattaaggtggattaattacctaagaccaggactaaagagggggtcgtttagtgaagaagaagaagagaccatcttgactttacattcttccttgggtaacaagtggtctcggattgcaaaatatttaccgggaagaacagacaacgagattaagaactattggcattcctatctgaagaagagatggctcaaatctcaaccacaactcaaaagccaaatatcagacctcacagaatctccttcttcactactttcttgcgggaaaagaaatctggaaaccgaaaccctagatcacgtgatctccttccagaaattttcagagaatccaacttcatcaccatccaaagaaagcaacaacaacatgatcatgaacaacagtaataacttgcctaaactgttcttctctgagtggatcagttcttcaaatccacacatcgattactcctctgcttttacagattccaagcacattaatgaaactcaagatcaaatcaatgaagaggaagtgatgatgatcaataacaacaactactcttcacttgaggatgtcatgctccgtacagattttttgcagcctgatcatgaatatgcaaattattattcttctggagatttcttcatcaacagtgaccaaaattatgtctaagaagagtgaatatgatcgtaagaggaacataagctagttacttgtgttacagc

SEQ ID NO: 230 - protein, 268 aa, Arabidopsis thaliana
  G1309 polypeptide
MTKSGERPKQRQRKGLWSPEEDQKLKSFILSRGHACWTTVPILAGLQRNGKSCRLRWINYLRPGLKRGSFSEEEEETILTLHSSLGNKWSRIAKYLPGRTDNEIKNYWHSYLKKRWLKSQPQLKSQISDLTESPSSLLSCGKRNLETETLDHVISFQKFSENPTSSPSKESNNNMIMNNSNNLPKLFFSEWISSSNPHIDYSSAFTDSKHINETQDQINEEEVMMINNNNYSSLEDVMLRTDFLQPDHEYANYYSSGDFFINSDQNYV

SEQ ID NO: 231 - DNA, 1047 bp, Arabidopsis thaliana
  G1354
atggaaagtctcgcacacattcctcccggttatcgattccatccgaccgatgaagaactcgttgactattatctcaagaacaaagttgcattcccgggaatgcaagttgatgttatcaaagatgttgatctctacaaaatcgagccatgggacatccaagagttatgtggaagagggacaggagaagagagggaatggtatttctttagccacaaggacaagaaatatccaactgggacacgaaccaatagagcaacgggctccggattttggaaagcaacgggtcgagacaaggccatttactcaaagcaagagcttgttgggatgaggaagactcttgtcttttacaaaggtagggccccaaatggtcagaaatctgattggataatgcacgaataccgtcttgagaccgatgaaaatggaccgcctcatgaggaaggatgggtggtttgtcgcgctttcaagaagaagctaaccacgatgaactacaacaatccaagaacaatgatgggatcatcatcaggccaagaatctaactggttcacgcagcaaatggatgtggggaatggtaattactatcatcttcctgatctagagagtccgagaatgtttcaaggctcatcatcatcatcactatcatcattacatcagaatgatcaagacccttatggtgtcgtactcagcactattaacgcaaccccaactacaataatgcaacgagatgatggtcatgtgattaccaatgatgatgatcatatgatcatgatgaacacaagtactggtgatcatcatcaatcaggattactagtcaatgatgatcataatgatcaagtaatggattggcaaacgcttgacaagtttgttgcttctcagctaatcatgagccaagaagaggaagaagttaacaaagatccatcagataattcttcgaatgaaacatttcatcatctctctgaagagcaagctgcaacaatggtttcgatgaatgcttcttcctcttcttctccatgttccttctactcttgggctcaaaatacacacacgtaa

SEQ ID NO: 232 - protein, 348 aa, Arabidopsis thaliana
  G1354 polypeptide
MESLAHIPPGYRFHPTDEELVDYYLKNKVAFPGMQVDVIKDVDLYKIEPWDIQELCGRGTGEEREWYFFSHKDKKYPTGTRTNRATGSGFWKATGRDKAIYSKQELVGMRKTLVFYKGRAPNGQKSDWIMHEYRLETDENGPPHEEGWVVCRAFKKKLTTMNYNNPRTMMGSSSGQESNWFTQQMDVGNGNYYHLPDLESPRMFQGSSSSSLSSLHQNDQDPYGVVLSTINATPTTIMQRDDGHVITNDDDHMIMMNTSTGDHHQSGLLVNDDHNDQVMDWQTLDKFVASQLIMSQEEEEVNKDPSDNSSNETFHHLSEEQAATMVSMNASSSSSPCSFYSWAQNTHT

SEQ ID NO: 233 - DNA, 1206 bp, Arabidopsis thaliana
  G1355
cgtcgacccgtcacatactcgatcaattataattatatattcggctgcgaagatttacaagaaataatggagccaatggaatcttgtagcgttcctccaggatttaggttccatccgacggacgaagagcttgtcgggtactatctaaggaagaaaatcgcatcgcaaaagattgatctcgacgtcatcagagacatcgatctctacagaatagaaccatgggatctacaagaacaatgtcgaatcggttatgaggaacaaaatgaatggtatttttttagtcacaaggacaagaaatatccaacggggacaagaactaatagagcgaccatggctggattttggaaagccacgggaagagacaaagctgtttacgacaaaacaaaactaattggtatgaggaaaacacttgtgttctacaaaggacgtgcacctaatggcaagaaatccgattggatcatgcatgagtaccggctcgagtcagatgagaatgcaccgccccaggaagaaggatgggtggtttgtagagcattcaaaaaaagagctacagggcaagccaagaacacggaaacttggagctcaagttacttttacgatgaagttgcaccgaatggagttaactcggttatggaccccattgattacatatctaagcagcaacataacatttttgggaaaggtttgatgtgtaagcaagaactagaaggaatggttgatggtataaactatatacaatcgaatcaattcattcagctcccacaactccaaagcccttctctcccgctgatgaaaagaccttcaagctcgatgtccataacatcaatggataacaattacaactataaactcccattagcggatgaagaaagcttcgagtcattcataagaggagaggatagaaggaagaagaaaaagcaagtaatgatgacgggaaattggagagagttagacaagtttgttgcttcacaacttatgagccaagaagacaatggaacttcaagtttcgcaggtcatcatatagttaatgaagataaaaacaacaatgatgtggagatggattcgtcaatgtttttgagcgaaagagaagaagaaaacaggttcgtcagtgaattcttgagtacaaactcggattatgatattgggatttgcgtatttgataattgaatgaaactacatagatggcatgtgagatttgttggtacgtgc

SEQ ID NO: 234 - protein, 365 aa, Arabidopsis thaliana
  G1355 polypeptide
MEPMESCSVPPGFRFHPTDEELVGYYLRKKIASQKIDLDVIRDIDLYRIEPWDLQEQCRIGYEEQNEWYFFSHKDKKYPTGTRTNRATMAGFWKATGRDKAVYDKTKLIGMRKTLVFYKGRAPNGKKSDWIMHEYRLESDENAPPQEEGWVVCRAFKKRATGQAKNTETWSSSYFYDEVAPNGVNSVMDPIDYISKQQHNIFGKGLMCKQELEGMVDGINYIQSNQFIQLPQLQSPSLPLMKRPSSSMSITSMDNNYNYKLPLADEESFESFIRGEDRRKKKKQVMMTGNWRELDKFVASQLMSQEDNGTSSFAGHHIVNEDKNNNDVEMDSSMFLSEREEENRFVSEFLSTNSDYDIGICVFDN

SEQ ID NO: 235 - DNA, 839 bp, Arabidopsis thaliana
  G1379
ctctgcctctctctctctctcaaaacccatctcgaaagtctttctctttcgagggtttagatcctccatggaaggcggcggagttgctgacgtggctgtccccggtacgaggaagagagacagaccttacaaaggaattaggatgaggaagtggggaaagtgggtggcggagattcgtgagcctaacaagcgctctaggttatggcttggctcttactctactcccgaggcggcggcgcgagcttacgacacggcggttttctatcttagaggacctacggcgaggcttaacttccctgagcttcttcctggggagaaattctccgacgaggatatgtcggctgcgaccatcaggaagaaagccacggaggtcggtgctcaggttgatgctttgggcacggcggtgcaaaataaccgccaccgtgtttttggtcagaatcgagatagtgatgtggataataagaattttcatcggaattatcaaaacggtgaacgagaagaagaagaagaagatgaggatgacaagagattgaggagtggcggccggttattggatcgggttgacttgaataaattacccgacccggaaagctccgatgaagaatgggaaagcaaacattaaaaatatatagtttggagcggtggctgttgctaacgtacgccaacggcttgcttctacgaatcattagcgccgtttatgatttttttttttttttttttcattatctgaaaatttagggctttttagttattaatttttgttttgtttttttcctttcttgcgagttttgcggtttatggaattttaggctattgcttaacgaaaaaaaaaaaaaaaa

SEQ ID NO: 236 - protein, 184 aa, Arabidopsis thaliana
  G1379 polypeptide
MEGGGVADVAVPGTRKRDRPYKGIRMRKWGKWVAEIREPNKRSRLWLGSYSTPEAAARAYDTAVFYLRGPTARLNFPELLPGEKFSDEDMSAATIRKKATEVGAQVDALGTAVQNNRHRVFGQNRDSDVDNKNFHRNYQNGEREEEEEDEDDKRLRSGGRLLDRVDLNKLPDPESSDEEWESKH

SEQ ID NO: 237 - DNA, 983 bp, Arabidopsis thaliana
  G1453
cgtcgacgcgaaataaatcctagaaaataactatcaatatgatgaaggttgatcaagattattcgtgtagtataccgcctggatttaggtttcatccgacagatgaagaacttgtcggatattatctcaagaagaaaatcgcctcccagaggattgatctcgacgttatcagagaaattgatctttacaagatcgaaccatgggatctacaagagagatgtaggatagggtacgaggagcaaacggagtggtatttcttcagccatagagacaagaagtatccgactgggactaggacaaaccgagccaccgtggccggtttctggaaagcaacgggccgggacaaggcggtttacctcaactccaaacttatcggtatgagaaaaacgcttgtcttttaccgaggtcgagcgcctaatggccaaaagtccgattggatcattcacgaatactacagcctcgagtcacaccagaactctcctccacaggaagaaggatgggtagtgtgtagagcatttaagaaacgaacgaccatcccaacaaaaaggaggcaactttgggatccgaactgcttattctacgacgacgccactctcttggaacctctcgacaagcgagccagacataatcctgattttaccgccacaccgttcaagcaagaactactctccgaggccagtcacgtccaggatggagatttcggatctatgtaccttcaatgcatcgatgatgatcaattctcccagcttcctcagctcgagagcccctctcttccgtcggaaataactccccatagtactactttttctgagaacagtagccggaaagatgacatgagctccgagaagaggatcactgactggagatatctagataagttcgtggcgtctcaatttttgatgagtggagaagactaaaaaaggctttcctatgcatgcatgcactagaaacgtcgtcgcattttggatttacatgcggccgct

SEQ ID NO: 238 - protein, 292 aa, Arabidopsis thaliana
  G1453 polypeptide
MMKVDQDYSCSIPPGFRFHPTDEELVGYYLKKKIASQRIDLDVIREIDLYKIEPWDLQERCRIGYEEQTEWYFFSHRDKKYPTGTRTNRATVAGFWKATGRDKAVYLNSKLIGMRKTLVFYRGRAPNGQKSDWIIHEYYSLESHQNSPPQEEGWVVCRAFKKRTTIPTKRRQLWDPNCLFYDDATLLEPLDKRARHNPDFTATPFKQELLSEASHVQDGDFGSMYLQCIDDDQFSQLPQLESPSLPSEITPHSTTFSENSSRKDDMSSEKRITDWRYLDKFVASQFLMSGED

SEQ ID NO: 239 - DNA, 1392 bp, Arabidopsis thaliana
  G1461
accgcccgcccgggcaggttaaacagtgaaaaaatatccgtggaagaagggtagttgagaaataaaaagagatcaacaagggtaaattaatcaatacgaaacttagatataacggttgccattaacttaaaagcacatttatgaacatgagtcttcttcgcttcatctccaagaaacaacactcatttttgcgtttaatctttctctctctcttgatcgatttagtttctttatgaggacgaaccaatgaaagttgaagacgaagcaacttatgagcttatcaaagacgaactgatgaaagcagaagacgaagcaacttattggctaatcaaagaagaactgatcaaagcagaagacgatgtaatcatctcacgttatctgaagcgtatgatcgttaacggggattcgtggcctgatcacttcatcgaagatgtagacgtgttcaacaagaatccaaatgaggagtttcattctcagagccctagattcgtgatcgttaaaccacgaacagagaattgtggtagaaccgatggatgtcaatctggttgctggaggatcattggtcgtgataaactgataaaatcgaaggagactgggaagattctagggttcaagaagattctcaagttctgcctaaagaagaaacctagagaatacaagagaagttgggtaatggaagagtacaggcttaacaataacttgaactgcaagcaagatcatgtgatttgcaagattcggtttatgttcgatgctgaaatcagtttcttgctagccaagcatttctcgtgtctctccactagatcaccgcttcctgcaaatcaattgttgccagcttatggagtctgtttcttcgattcagaagcggagggtgcattttatctggagacgataatcggttatgatggaaacacttggcctagctacgttaccaacgatgtgtaccgtttgcatccgttgacgcttgtggatcctcaagatgacaagtttaaagagttcggaacctgtatctttgctaacaggacaaagacttgtggtaaaaccgatgaatgtgatggtggtggttgctggaggatcgtagaaggtcatagagttatcaagtcaaaaggtaaggttcttggttacaggaggatttttcaattttcggaaaatgaggaaccaagaaatgtttgtgaaggagaagatccgaagaaaactgcttggttcatagaagagtataggcctgacgaaaataataagaaggataaagtgttatgcgttatcaagttcttaatcccactcaaccaaaggtaacaaggagattttactctggaagtcatactccgtagcacttcgatgtgttcttactgagactggtcacattagctgatagggtatatcaaaaaaaaaaaaaaa

SEQ ID NO: 240 - protein, 347 aa, Arabidopsis thaliana
  G1461 polypeptide
MKVEDEATYELIKDELMKAEDEATYWLIKEELIKAEDDVIISRYLKRMIVNGDSWPDHFIEDVDVFNKNPNEEFHSQSPRFVIVKPRTENCGRTDGCQSGCWRIIGRDKLIKSKETGKILGFKKILKFCLKKKPREYKRSWVMEEYRLNNNLNCKQDHVICKIRFMFDAEISFLLAKHFSCLSTRSPLPANQLLPAYGVCFFDSEAEGAFYLETIIGYDGNTWPSYVTNDVYRLHPLTLVDPQDDKFKEFGTCIFANRTKTCGKTDECDGGGCWRIVEGHRVIKSKGKVLGYRRIFQFSENEEPRNVCEGEDPKKTAWFIEEYRPDENNKKDKVLCVIKFLIPLNQR

SEQ ID NO: 241 - DNA, 1195 bp, Arabidopsis thaliana
  G1464
ccatgagtctcacttcttcttcgctctccaagaaacaaaacactcgatcttgcgtttgatctttctctctctatagatctttttcttgatcgattttatctcattatggaagataacgacgcagcttatgatcaagtcaaatccgaactgttaaactcagaagacgaagtaataatctcacgttatctgaagcctatggtcgttaacggagattcttggccagatcacttcatcgaagacgcaaacgtgttcaccaagaatccaaatgaggtgttcaattctgagagacctagattcgttatcgttaaaccacgaacagaggcttgtggtaagaccgatggatgtgaatctggttgctggaggaccatgggtcgtgataaactgataaagtcggaggagactgggaagattctagggttcaagaagattctcaagttttgcataaagtggaaacctatagaatacaagagaagttgggtaatggaagagtataggcttaccaataacttgaactggaagcaagatcatgtgatttgcaagattcggcttttgtttgaagcagaaattagtttcttgctagccaagcatttctacactacgtcagaatcacttcttcgacatgagctattgccatcttatggatatttatccaatacacaagaggaggatgaattttatctgaagacgataatgacttcggaaggaaacgattggcctagctacgttaccaacaacgtgtactgtcttcatccattggagcttgtggatcttcaagatgtgatgtttcaaagttacggaacctgcatcttcgctaacgggacttgtggtgaatctgataaatgcgatggtggttactggaagatcctgcacggtgataagctgatcaagtcaaatttcgggatggtcactggtttcaagaaggaagaaacagagaggttaggtcatcaacgttgccaaggcttgttgttgccacaccgtcgtggccatgtacaaaccaagagttgcggtgtcgtcaccgtgaaggagaagaggagtttggtagagcaaccggaggagattgtcgctgcacctgagacaccacgccaaggaaaaagtgagcataatgatccactaaagcgaaagaaagcgattggttgcgtgggagagaaagctgagatgtaggcgagacgtcaccactacgaatggagatgcggcc

SEQ ID NO: 242 - protein, 351 aa, Arabidopsis thaliana
  G1464 polypeptide
MEDNDAAYDQVKSELLNSEDEVIISRYLKPMVVNGDSWPDHFIEDANVFTKNPNEVFNSERPRFVIVKPRTEACGKTDGCESGCWRTMGRDKLIKSEETGKILGFKKILKFCIKWKPIEYKRSWVMEEYRLTNNLNWKQDHVICKIRLLFEAEISFLLAKHFYTTSESLLRHELLPSYGYLSNTQEEDEFYLKTIMTSEGNDWPSYVTNNVYCLHPLELVDLQDVMFQSYGTCIFANGTCGESDKCDGGYWKILHGDKLIKSNFGMVTGFKKEETERLGHQRCQGLLLPHRRGHVQTKSCGVVTVKEKRSLVEQPEEIVAAPETPRQGKSEHNDPLKRKKAIGCVGEKAEM

SEQ ID NO: 243 - DNA, 1066 bp, Arabidopsis thaliana
  G1465
ctcattcttgcgtttgatctttctttctctagatcccatatttttcttgatcaatttagtttcattatggaggaagatgcagcttttgatctactcaaagccgaactcttaaacgcagaagacgatgcaataatctcacgttatctgaagcgtatggtcgtcaacggagactcatggcctgatcacttcatcgaagacgcagacgtgttcaacaagaatccaaatgtggagttcgatgctgagagccctagcttcgtgatagttaaacctcgaacagaggcttgtggtaaaaccgatggatgtgaaactggttgctggaggatcatgggtcgtgataaaccgataaaatcgacggagactgtgaagattcaagggttcaagaagattctcaagttctgcctaaagaggaaacctagaggatacaagagaagttgggtaatggaagagtataggcttaccaataacttgaactggaagcaagatcatgtgatttgcaagattcggtttatgtttgaagctgaaatcagtttcttgctagccaagcatttctacactacatcagaatcacttcctcgaaatgagctgttgccagcttacggattcctttcatcagataagcaattggaggatgtatcttatccggtgacgataatgacttctgaaggaaacgattggcctagctacgttaccaacaatgtgtattgtctgcatccattggagctcgttgatcttcaagatcggatgtttaatgattacggaacctgcatcttcgctaacaagacttgtggtaaaaccgatagatgcattaatggtggttactggaaaattttgcaccgtgataggctgatcaagtcaaagtccgggatagttattggtttcaagaaggtgtttaagtttcatgaaacggagaaagaaagatacttctgtggtggagaagatgtgaaggtaacttggactctagaagagtataggcttagcgtgaagcagaataaattcttgtgcgttatcaagtttacttatgataactaagaatcttttctttggattttatgatcatcttagtatc

SEQ ID NO: 244 - protein, 320 aa, Arabidopsis thaliana
  G1465 polypeptide
MEEDAAFDLLKAELLNAEDDAIISRYLKRMVVNGDSWPDHFIEDADVFNKNPNVEFDAESPSFVIVKPRTEACGKTDGCETGCWRIMGRDKPIKSTETVKIQGFKKILKFCLKRKPRGYKRSWVMEEYRLTNNLNWKQDHVICKIRFMFEAEISFLLAKHFYTTSESLPRNELLPAYGFLSSDKQLEDVSYPVTIMTSEGNDWPSYVTNNVYCLHPLELVDLQDRMFNDYGTCIFANKTCGKTDRCINGGYWKILHRDRLIKSKSGIVIGFKKVFKFHETEKERYFCGGEDVKVTWTLEEYRLSVKQNKFLCVIKFTYDN

SEQ ID NO: 245 - DNA, 1393 bp, Arabidopsis thaliana
  misc_feature (1385)..(1385): n is a, c, g, or t
  G1754
aacctttctcttctctgctaacgagaaaacaaaagctatcgtctttgctactactactactactattattacattgaatcctttgtgttcttcttcttcagctgctactttgttcgagtgctttcttacatgccgtcggagattgttgacaggaaaaggaagtctcgtggaacacgagatgtagctgagattctaaggcaatggagagagtacaatgagcagattgaggcagaatcttgtatcgatggtggtggtccaaaatcaatccgaaagcctcctccaaaaggttcgaggaagggttgtatgaaaggtaaaggtggacctgaaaacgggatttgtgactatagaggagttagacagaggagatggggtaaatgggttgctgagatccgtgagccagacggaggtgctaggttgtggctcggtactttctccagttcatatgaagctgcattggcttatgacgaggcggccaaagctatatatggtcagtctgccagactcaatcttcccgagatcacaaatcgctcttcttcgactgctgccactgccactgtgtcaggctcggttactgcattttctgatgaatctgaagtttgtgcacgtgaggatacaaatgcaagttcaggttttggtcaggtgaaactagaggattgtagcgatgaatatgttctcttagatagttctcagtgtattaaagaggagctgaaaggaaaagaggaagtgagggaagaacataacttggctgttggttttggaattggacaggactcgaaaagggagactttggatgcttggttgatgggaaatggcaatgaacaagaaccattggagtttggtgtggatgaaacgtttgatattaatgagctattgggtatattaaacgacaacaatgtgtctggtcaagagacaatgcagtatcaagtggatagacacccaaatttcagttaccaaacgcagtttccaaattctaacttgctcgggagcctcaaccctatggagattgctcaaccaggagttgattatggatgtccttatgtgcagcccagtgatatggagaactatggtattgatttagaccatcgcaggttcaatgatcttgacatacaggacttggattttggaggagacaaagatgttcatggatctacataagatttcaaatttcgtttgactggcctaagtttgtgattctgctccgagacggtgtagctgttactagctagaagctgcccttctttgaagctactgatactttctgatattaatggttgtgagacgtagtacatgtagttaggtaatgtaggacaagttcaaatatgattccttctttctttttcttgtgaatacatatgacatatgaagaagttcaaacgttgggtttnaaaaaaaa

SEQ ID NO: 246 - protein, 341 aa, Arabidopsis thaliana
  G1754 polypeptide
MPSEIVDRKRKSRGTRDVAEILRQWREYNEQIEAESCIDGGGPKSIRKPPPKGSRKGCMKGKGGPENGICDYRGVRQRRWGKWVAEIREPDGGARLWLGTFSSSYEAALAYDEAAKAIYGQSARLNLPEITNRSSSTAATATVSGSVTAFSDESEVCAREDTNASSGFGQVKLEDCSDEYVLLDSSQCIKEELKGKEEVREEHNLAVGFGIGQDSKRETLDAWLMGNGNEQEPLEFGVDETFDINELLGILNDNNVSGQETMQYQVDRHPNFSYQTQFPNSNLLGSLNPMEIAQPGVDYGCPYVQPSDMENYGIDLDHRRFNDLDIQDLDFGGDKDVHGST

SEQ ID NO: 247 - DNA, 1410 bp, Arabidopsis thaliana
  G1766
aggctattctcggaaaaacaaagaataaagaatgaattcgttttcacaagtacctcctggcttcagatttcatcctactgatgaagaacttgtagactactacttgaggaaaaaagttgcatcaaagagaatagaaatcgatatcatcaaggatgttgatctttacaagattgagccatgtgatcttcaagagttatgcaagataggaaacgaagagcagagcgaatggtacttctttagtcataaagacaagaagtatcccacgggaactcgaaccaatagagccacgaaagcaggattttggaaagccactggaagagacaaggctatatatataagacatagtcttatcggtatgaggaaaacacttgtgttttacaaaggaagagccccaaatggtcagaaatccgattggatcatgcacgaatatcgcttagaaacaagtgaaaatggaacccctcaggaagaaggatgggtagtatgtagggtattcaagaagaaattggcagcgacagtgaggaaaatgggagattaccattcatcaccatcgcagcattggtacgatgatcagctctcttttatggcctccgagatcatttctagttctccacgacagtttcttcccaatcatcattataaccgccaccatcaccagcagacattgccttgtggcctcaatgcattcaacaacaacaatcctaacttgcaatgcaagcaagagctcgagttacattacaatcaaatggtacaacatcaacaacaaaaccatcatcttcgtgaatctatgtttctccagcttcctcagctcgaaagccctaccagtaattgcaattctgacaacaacaataacacaagaaatattagtaacttgcagaaatcatcaaatatatctcatgaggaacaattgcaacaagggaatcaaagtttcagctctctgtattacgatcaaggagtagagcaaatgactactgactggagagttctcgataaatttgttgcttcacagcttagcaatgatgaagaggctgcagccgtggtttcttcttcttctcatcaaaacaacgtcaagattgacacgagaaacacgggttatcatgtgatagatgagggaataaatttgccggagaatgattctgaaagggttgttgaaatgggagaagagtattcaaatgctcatgctgcttctacttcttcaagttgtcagattgatctctagaaatagtgatagagagatgaaaaagatgcaaggtgaatatatatgaaaatacatgcacactagtgttatttatacttaaagatggaaggggaaaaacaaggagttatttcctggatttatggaggttttgtacataataaaaacctacaaccatatggtattttcttttgaaaaaaaaaaaaaaaaaaaaaaaa

SEQ ID NO: 248 - protein, 394 aa, Arabidopsis thaliana
  G1766 polypeptide
MNSFSQVPPGFRFHPTDEELVDYYLRKKVASKRIEIDIIKDVDLYKIEPCDLQELCKIGNEEQSEWYFFSHKDKKYPTGTRTNRATKAGFWKATGRDKAIYIRHSLIGMRKTLVFYKGRAPNGQKSDWIMHEYRLETSENGTPQEEGWVVCRVFKKKLAATVRKMGDYHSSPSQHWYDDQLSFMASEIISSSPRQFLPNHHYNRHHHQQTLPCGLNAFNNNNPNLQCKQELELHYNQMVQHQQQNHHLRESMFLQLPQLESPTSNCNSDNNNNTRNISNLQKSSNISHEEQLQQGNQSFSSLYYDQGVEQMTTDWRVLDKFVASQLSNDEEAAAVVSSSSHQNNVKIDTRNTGYHVIDEGINLPENDSERVVEMGEEYSNAHAASTSSSCQIDL

SEQ ID NO: 249 - DNA, 696 bp, Arabidopsis thaliana
  G1792
aatccatagatctcttattaaataacagtgctgaccaagctcttacaaagcaaaccaatctagaacaccaaagttaatggagagctcaaacaggagcagcaacaaccaatcacaagatgacaagcaagctcgtttccggggagttcgaagaaggccttggggaaagtttgcagcagagattcgagacccgtcgagaaacggtgcccgtctttggctcgggacatttgagaccgctgaggaggcagcaagggcttatgaccgagcagcctttaaccttaggggtcatctcgctatactcaacttccctaatgagtattatccacgtatggacgactactcgcttcgccctccttatgcttcttcttcttcgtcgtcgtcatcgggttcaacttctactaatgtgagtcgacaaaaccaaagagaagttttcgagtttgagtatttggacgataaggttcttgaagaacttcttgattcagaagaaaggaagagataatcacgattagttttgttttgatattttatgtggcactgttgtggctacctacgtgcattatgtgcatgtataggtcgcttgattagtactttataacatgcatgccacgaccataaattgtaagagaagacgtactttgcgttttcatgaaatatgaatgttagatggtttgagtacaaaaaaaaaaaaaaaaaaaaaaa

SEQ ID NO: 250 - protein, 139 aa, Arabidopsis thaliana
  G1792 polypeptide
MESSNRSSNNQSQDDKQARFRGVRRRPWGKFAAEIRDPSRNGARLWLGTFETAEEAARAYDRAAFNLRGHLAILNFPNEYYPRMDDYSLRPPYASSSSSSSSGSTSTNVSRQNQREVFEFEYLDDKVLEELLDSEERKR

SEQ ID NO: 251 - DNA, 450 bp, Arabidopsis thaliana
  G1795
acaaacacgcaaaaagtcattaatatatggatcaaggaggtcgaggtgtcggtgccgagcatggaaagtaccggggagttcggagacgaccttggggaaaatatgcagcagagatacgagattcgaggaagcacggtgaacgtgtgtggcttggaacgttcgatacggcagaggaagcggctagagcctatgaccaagctgcttactccatgagaggccaagcagcaatccttaacttccctcatgagtataacatggggagtggtgtctcttcttccaccgccatggctggatcttcctccgcctccgcctccgcttcttcttcttctaggcaagtttttgaatttgagtacttggatgatagtgttttggaggagctccttgaggaaggagagaaacctaacaagggcaagaagaaatgagcgagatataattcatgattatttctaa

SEQ ID NO: 252 - protein, 131 aa, Arabidopsis thaliana
  G1795 polypeptide
MDQGGRGVGAEHGKYRGVRRRPWGKYAAEIRDSRKHGERVWLGTFDTAEEAARAYDQAAYSMRGQAAILNFPHEYNMGSGVSSSTAMAGSSSASASASSSSRQVFEFEYLDDSVLEELLEEGEKPNKGKKK

SEQ ID NO: 253 - DNA, 1356 bp, Arabidopsis thaliana
  G1806
atgcagagcagcttcaaaaccgttcctttcactcctgatttctactctcaatcctcttacttcttcagaggagatagttgtcttgaggagtttcatcaaccagtcaatggttttcaccatgaagaagctatcgatttaagtccaaatgtcactattgcttcagctaacttacactacacgacgtttgatacggttatggattgtggtggtggtggtggtggcttgagggagagacttgaaggaggagaagaggagtgtttggacacagggcaattagtgtaccagaaagggacaagattagtaggaggaggagtaggagaagtgaacagcagttggtgtgattcggtttcagctatggctgataacagtcaacatactgacacttccacagatattgatactgatgacaagactcagttgaatggaggtcatcaagggatgctattggctacaaattgttcagatcaatccaatgtgaaatctagtgatcaaaggacacttcgtcgacttgctcagaaccgggaggctgctaggaaaagtcggttgaggaaaaaggcctatgttcagcaacttgagaatagtcgaatcaggcttgcacagctagaggaagagctcaaaagagctcgccaacagggatctttggttgaaagaggagtttcagcggatcacacgcatttggcagcaggaaatggtgtcttttcatttgaattggaatatacacgttggaaggaggaacatcaaagaatgatcaacgacttaagatcgggtgtgaattcgcagttaggtgacaacgatctacgcgttctagtggatgctgtgatgagtcactatgatgaaatattcaggctaaagggaattggcactaaagttgaagtctttcatatgctctcaggcatgtggaagacacctgccgagagatttttcatgtggttaggtggatttagatcatcagagttacttaagatattggggaaccatgtggatccattgacggaccagcagttgataggcatttgcaaccttcagcaatcgtctcaacaagcagaggatgcattgtcacaaggcatggaagctctacaacaatcacttctcgagacgctttcttctgcttctatgggtccaaactcttcagcaaatgttgcagattatatgggtcatatggctatggctatgggcaaacttggcactcttgaaaacttccttcgccaggctgatttattgaggcaacaaactctgcaacagcttcacagaattctcaccacacgacaagctgctcgcgcctttttggtcatccacgattatatttctcggcttagagcacttagctctctatggttagccagacctagagactaa

SEQ ID NO: 254 - protein, 451 aa, Arabidopsis thaliana
  G1806 polypeptide
MQSSFKTVPFTPDFYSQSSYFFRGDSCLEEFHQPVNGFHHEEAIDLSPNVTIASANLHYTTFDTVMDCGGGGGGLRERLEGGEEECLDTGQLVYQKGTRLVGGGVGEVNSSWCDSVSAMADNSQHTDTSTDIDTDDKTQLNGGHQGMLLATNCSDQSNVKSSDQRTLRRLAQNREAARKSRLRKKAYVQQLENSRIRLAQLEEELKRARQQGSLVERGVSADHTHLAAGNGVFSFELEYTRWKEEHQRMINDLRSGVNSQLGDNDLRVLVDAVMSHYDEIFRLKGIGTKVEVFHMLSGMWKTPAERFFMWLGGFRSSELLKILGNHVDPLTDQQLIGICNLQQSSQQAEDALSQGMEALQQSLLETLSSASMGPNSSANVADYMGHMAMAMGKLGTLENFLRQADLLRQQTLQQLHRILTTRQAARAFLVIHDYISRLRALSSLWLARPRD

SEQ ID NO: 255 - DNA, 318 bp, Arabidopsis thaliana
  G1816
atggataacactgaccgtcgtcgccgtcgtaagcaacacaaaatcgccctccatgactctgaagtgagcagtatcgaatgggagtttatcaacatgactgaacaagaagaagatctcatctttcgaatgtacagacttgtcggtgataggtgggatttgatagcaggaagagttcctggaagacaaccagaggagatagagagatattggataatgagaaacagtgaaggctttgctgataaacgacgccagcttcactcatcttcccacaaacataccaagcctcaccgtcctcgcttttctatctatccttcctag

SEQ ID NO: 256 - protein, 105 aa, Arabidopsis thaliana
  G1816 polypeptide
MDNTDRRRRRKQHKIALHDSEVSSIEWEFINMTEQEEDLIFRMYRLVGDRWDLIAGRVPGRQPEEIERYWIMRNSEGFADKRRQLHSSSHKHTKPHRPRFSIYPS

SEQ ID NO: 257 - DNA, 1160 bp, Arabidopsis thaliana
  G1846
aatttcataaatcatagagagagagagagagagagagagagagtttggaaacattccaaaaccagaactcgatattatttcaccaaagaatgatagaaacaagaactatctttttataaaactctttacaccccaaaagaaaatgtctcactcgttttgccttataatatttctttcaacaacaacccaaatctacaaaaaatcccaataaaaaaaaacttcagtctgtttgacattttgtcgaacacttggacggcatcacaaaaagctctaaactttctgactaccaatggcggattcgtcttccgacaaggagaagaaggaaaataataagcagcccgtgtatcgtggagtccgtatgaggagctggggaaaatgggtatcggagattcgcgaaccgaggaagaaatcgagaatctggctcgggacttttccgacggcggagatggctatgcgtgctcacgacgtggcggctatgagtatcaaaggaacttcagccattctcaatttccctgagctctctaaacttcttccccgacccgtttcgctcagccctcgtgacgtcagagctgcggcgaccaaagctgctctcatggacttcgatacgacggcgtttcgttcggatactgagactagcgaaacgacgacgtcgaataaaatgtcagagagtagtgagagtaacgaaacggtgtcgttctcatcgtcgtcttggtcctctgttacgagcattgaggaaagtacagtctccgacgatcttgacgagatcgtaaagttaccgagtctaggaacgagcctaaacgagtcgaacgagttcgtgatatttgactcgttggaggatttggtgtacatgcctcggtggttaagcggtacggaagaagaagtttttacgtataataacaatgattcttcgttgaattactcatcagttttcgaatcttggaaacattttccctgagaaaagaaagaagccatattttctctctctttttcgccatttttggttttaagttttttgatgggattctctctgtttttgctatgcgtgagatatctctctttgtggaatagataacttttctgttgaaaatctcctaagtctgtgaaatgaacgacgatggaaatgtaagtgtgtatattagcccgaaataatgactgtatac

SEQ ID NO: 258 - protein, 221 aa, Arabidopsis thaliana
  G1846 polypeptide
MADSSSDKEKKENNKQPVYRGVRMRSWGKWVSEIREPRKKSRIWLGTFPTAEMAMRAHDVAAMSIKGTSAILNFPELSKLLPRPVSLSPRDVRAAATKAALMDFDTTAFRSDTETSETTTSNKMSESSESNETVSFSSSSWSSVTSIEESTVSDDLDEIVKLPSLGTSLNESNEFVIFDSLEDLVYMPRWLSGTEEEVFTYNNNDSSLNYSSVFESWKHFP

SEQ ID NO: 259 - DNA, 885 bp, Arabidopsis thaliana
  G1917
atgcagactccgtacactacttcaacgcaggggcaatattgtcattcttgtggaatgttccaccaccatagccaaagctgctgctacaacaacaacaacaactccaacgccggttcttactcgatggtcttctccatgcaaaacggtggcgttttcgagcagaacggtgaggactatcatcactcttcctccctcgttgactgcactctctctcttggaactccttctacgaggctttgtgaggaagatgagaaacgtagacgctctacttcatctggtgcttcttcttgcatctccaacttttgggacttgattcacaccaaaaacaacaactccaaaacggcaccgtacaataacgttccttctttctccgctaacaagccaagtcgcggttgttccggtggtggtggtggcggaggaggcggtggcggaggtgactctcttctcgctagacgctgtgccaactgtgacactacttctactccactatggaggaatggtcctagaggccctaagtccctatgcaacgcatgcggcattcgtttcaagaaggaagagagaagaactactgcggctacaggaaacaccgtcgtcggagctgcaccggttcaaaccgaccagtacgggcatcacaactctggctacaataattaccatgctgccactaataacaacaataataatggtactccgtgggctcatcaccactcgacgcagagggttccgtgtaattatccggcaaatgagatcaggttcatggatgattacggcagtggagtagcaaacaacgttgaatccgacggtgctcacggcggtgttccgttcctttcttggaggcttaatgtagcggatagggcaagtcttgtccatgactttaccagatga

SEQ ID NO: 260 - protein, 294 aa, Arabidopsis thaliana
  G1917 polypeptide
MQTPYTTSTQGQYCHSCGMFHHHSQSCCYNNNNNSNAGSYSMVFSMQNGGVFEQNGEDYHHSSSLVDCTLSLGTPSTRLCEEDEKRRRSTSSGASSCISNFWDLIHTKNNNSKTAPYNNVPSFSANKPSRGCSGGGGGGGGGGGGDSLLARRCANCDTTSTPLWRNGPRGPKSLCNACGIRFKKEERRTTAATGNTVVGAAPVQTDQYGHHNSGYNNYHAATNNNNNNGTPWAHHHSTQRVPCNYPANEIRFMDDYGSGVANNVESDGAHGGVPFLSWRLNVADRASLVHDFTR

SEQ ID NO: 261 - DNA, 1080 bp, Arabidopsis thaliana
  G2058
tctttgagtttgttggttgcattgatcggatataagagacatgggtcgagtgaaattggagataaaacgaatagaaaacacaacgaatcgacaagttacattctccaaaagacgaaatggtcttataaagaaagcttatgaattgtccattctttgtgacatcgacattgctctcctcatgttctctccctctgatcgccttagcctcttttcgggcaaaacaaggattgaagacgttttctctagatacatcaatctttctgatcaagaacgagagaatgctctagtattccccgatcaaagtcgacgcccagatttccagagcaaagagtatctactccggactttgcagcaactcaaggctgagaatgatattgctcttcaacttaccaaccctacagctatcaactccgacgtcgaggaacttgagcatgaagtttataagttacaacaacaacttctcatggcagaggaagaactaaggaaatacgaaccagatccaatcaggtttacaacaatggaagagtacgaaacttgtgagaagcagctcatggacaccttaacacgtgtcaatcaacgacgggaacatatattgagtcaagaccaattatcttcatatgaagcatctgctttacaacaacagcaaagcatgggtgggccttttggaaacgacgtcgttggaggatggctgactgaaaatgggcctaacgaagcccatttattcgacgcatcggcacattcagcaatgtatgaaactttattgcaaggaagtagctcaagctcgaaccaaaacaacattatgggtgaatccaatgtgtcaaatcataacggtgacatgtttcaagaatgggcccaagcctataattctactacggcccataacccttcgactctatttcctcctatgcagcatcagcatggactggtggttgatcccaatatagaagaaattgaaataccggttatgaagaaggatgcacaagcagaccacgaggtctccgactatgatataagaatgcctcagctcagtagccaataatctcaaggaatttcaattttaccatatattattgacataat

SEQ ID NO: 262 - protein, 332 aa, Arabidopsis thaliana
  G2058 polypeptide
MGRVKLEIKRIENTTNRQVTFSKRRNGLIKKAYELSILCDIDIALLMFSPSDRLSLFSGKTRIEDVFSRYINLSDQERENALVFPDQSRRPDFQSKEYLLRTLQQLKAENDIALQLTNPTAINSDVEELEHEVYKLQQQLLMAEEELRKYEPDPIRFTTMEEYETCEKQLMDTLTRVNQRREHILSQDQLSSYEASALQQQQSMGGPFGNDVVGGWLTENGPNEAHLFDASAHSAMYETLLQGSSSSSNQNNIMGESNVSNHNGDMFQEWAQAYNSTTAHNPSTLFPPMQHQHGLVVDPNIEEIEIPVMKKDAQADHEVSDYDIRMPQLSSQ

SEQ ID NO: 263 - DNA, 975 bp, Arabidopsis thaliana
  G2067
gtcattcagaatacttttatctcatattcccaacacttgttcaagcatatctaagtcaataacaacattacaacataacatggtgaaacaagaactcaagatccaagttactacttcctcatcatcactctctcattcttcatcttcttcttcttcttcaacgtcggcactacgtcatcaatcttgtaagaacaagataaagaagtataaaggtgtgaggatgcgaagttggggatcatgggttactgaaattagggcaccaaatcaaaagacaagaatctggttaggttcttactccaccgcagaagcagctgctagggcttacgacgctgctctcttgtgtcttaagggacctaaagctaatctcaacttccctaacatcaccactacttctccttttcttatgaacatcgacgaaaagacccttttgtccccaaaatcaatccaaaaggtcgccgctcaagccgctaactcctcttctgaccattttacccctccgtccgatgaaaatgatcatgatcatgatgacggactcgatcaccatccatctgcttcttcttcagctgcatcttcaccaccagatgatgatcatcataatgatgacgatggtgatttggtatcgttgatggaatctttcgtggattacaacgaacacgtgtctctgatggatccatcgctgtatgaatttggacataatgagatcttcttcaccaacggagatccgtttgattattctccacagttacatagctcagaggcaacgatggatgacttctacgacgatgttgatattccgctatggagtttcagttaatccaacggtccatattattatactacgaaacacttttaattcacattatttcatttaatttattctttcaattcatattattcgtccttgttgtttcgttatgtattaaatatacacacactaatttaagaagatcacatggactagaggtttttttgtca

SEQ ID NO: 264 - protein, 244 aa, Arabidopsis thaliana
  G2067 polypeptide
MVKQELKIQVTTSSSSLSHSSSSSSSSTSALRHQSCKNKIKKYKGVRMRSWGSWVTEIRAPNQKTRIWLGSYSTAEAAARAYDAALLCLKGPKANLNFPNITTTSPFLMNIDEKTLLSPKSIQKVAAQAANSSSDHFTPPSDENDHDHDDGLDHHPSASSSAASSPPDDDHHNDDDGDLVSLMESFVDYNEHVSLMDPSLYEFGHNEIFFTNGDPFDYSPQLHSSEATMDDFYDDVDIPLWSFS

SEQ ID NO: 265 - DNA, 765 bp, Arabidopsis thaliana
  G2115
aatcactctacaaagcctgtacgtacacaacaacattaccatggtgaaacaagaacgcaagatccaaaccagcagcacaaaaaaggaaatgcctttgtcatcatcaccatcttcttcttcttcttcatcttcttcctcgtcttcgtcttcgtgtaagaacaagaacaagaagagtaagattaagaagtacaaaggagtgaggatgagaagttggggatcatgggtctctgagattagggcaccaaatcaaaagacaaggatttggttaggttcttactcaacagctgaagcagctgctagagcttacgatgttgcactcttatgtctcaaaggccctcaagccaatctcaacttccctacttcttcttcttctcatcatcttcttgataatctcttagatgaaaatacccttttgtcccccaaatccatccaaagagtagctgctcaagctgccaactcatttaaccattttgcccctacttcatcagccgtctcgtcaccgtccgatcatgatcatcaccatgatgatgggatgcaatctttgatgggatcttttgtggacaatcatgtgtctttgatggattcaacatcttcatggtatgatgatcataatgggatgttcttgtttgataatggagctccattcaattactctcctcaactaaactcgacgacgatgctcgatgaatacttctacgaagatgctgacattccgctttggagtttcaattaatccgacggtccataatacatactttaattagt

SEQ ID NO: 266 - protein, 230 aa, Arabidopsis thaliana
  G2115 polypeptide
MVKQERKIQTSSTKKEMPLSSSPSSSSSSSSSSSSSSCKNKNKKSKIKKYKGVRMRSWGSWVSEIRAPNQKTRIWLGSYSTAEAAARAYDVALLCLKGPQANLNFPTSSSSHHLLDNLLDENTLLSPKSIQRVAAQAANSFNHFAPTSSAVSSPSDHDHHHDDGMQSLMGSFVDNHVSLMDSTSSWYDDHNGMFLFDNGAPFNYSPQLNSTTMLDEYFYEDADIPLWSFN

SEQ ID NO: 267 - DNA, 485 bp, Arabidopsis thaliana
  G2133
atctcatcttcatccacccaaaaacatggattcaagagacaccggagaaactgaccagagcaagtacaaaggtatccgtcgtcggaaatggggaaaatgggtatcagagattcgtgtcccgggaactcgtcaacgtctctggttaggctctttctccaccgcagaaggcgctgccgtagcccacgacgtcgctttttactgcttgcaccgaccatcttccctcgacgacgaatcttttaacttccctcacttacttacaacctccctcgcctccaatatatctcctaagtccatccaaaaagctgcttccgacgccggcatggccgtggacgccggattccatggtgctgtgtctgggagtggtggttgtgaagagagatcttccatggcgaatatggaggaggaggacaaacttagtatctccgtgtatgattatcttgaagacgatctcgtttgatctatacgagtacgtttttagcagttaa

SEQ ID NO: 268 - protein, 143 aa, Arabidopsis thaliana
  G2133 polypeptide
MDSRDTGETDQSKYKGIRRRKWGKWVSEIRVPGTRQRLWLGSFSTAEGAAVAHDVAFYCLHRPSSLDDESFNFPHLLTTSLASNISPKSIQKAASDAGMAVDAGFHGAVSGSGGCEERSSMANMEEEDKLSISVYDYLEDDLV

SEQ ID NO: 269 - DNA, 929 bp, Arabidopsis thaliana
  G2148
gtctctaatataagcttgaacgttgctatatataaatgtaaaggcgaacgcataagaaaagaaaaatggagaatgaagcttttgtagatggtgaattggagtctcttttggggatgttcaactttgatcaatgttcatctaacgaatcgagcttttgcaatgctccaaatgagactgatgttttctcttctgatgatttcttcccatttggtacaattctgcaaagtaactatgcggccgttcttgatggttccaaccaccaaacgaaccgaaatgtcgactcaagacaagatctgttgaaaccaaggaagaagcaaaagttaagctcggaaagcaatttggttaccgagcctaagactgcttggagagatggtcaaagcctaagcagttataatagttcagatgatgaaaaggctttaggtttagtgtctaatacatcaaaaagcctaaaacgcaaagcgaaagccaacagagggatagcttccgatcctcagagcctatacgctaggaaacgaagagaaaggataaacgataggctaaagacattgcagagcctagttcctaatgggacaaaggtcgatataagcacaatgctggaagatgctgtccattacgtgaagttcctgcagcttcaaatcaagctcttgagttcagaagatctatggatgtatgcacctcttgctcacaatggtctgaatatgggactacatcacaatcttttgtctcggcttatttaagacaaaatcattggaataacataacttacagtacttgttttttttctcgttctatattcatgattatggttattttttgtttgagttgttcaatttttctgtctattgcgttctatgaacttgacactctttttgtaattattatatgctaaagacaatttggactaacagcattttaataaaaaaaaaaaa

SEQ ID NO: 270 - protein, 223 aa, Arabidopsis thaliana
  G2148 polypeptide
MENEAFVDGELESLLGMFNFDQCSSNESSFCNAPNETDVFSSDDFFPFGTILQSNYAAVLDGSNHQTNRNVDSRQDLLKPRKKQKLSSESNLVTEPKTAWRDGQSLSSYNSSDDEKALGLVSNTSKSLKRKAKANRGIASDPQSLYARKRRERINDRLKTLQSLVPNGTKVDISTMLEDAVHYVKFLQLQIKLLSSEDLWMYAPLAHNGLNMGLHHNLLSRLI

SEQ ID NO: 271 - DNA, 999 bp, Arabidopsis thaliana
  G2424
atgaggatggagatggtgcatgctgacgtggcgtctctctccataacaccttgcttcccgtcttctttgtcttcgtcctcacatcatcactataaccaacaacaacattgtatcatgtcggaagatcaacaccattcgatggatcagaccacttcatcggactacttctctttaaatatcgacaatgctcaacatctccgtagctactacacaagtcatagagaagaagacatgaaccctaatctaagtgattacagtaattgcaacaagaaagacacaacagtctatagaagctgtggacactcgtcaaaagcttcggtgtctagaggacattggagaccagctgaagatactaagctcaaagaactagtcgccgtctacggtccacaaaactggaacctcatagctgagaagctccaaggaagatccgggaaaagctgtaggcttcgatggtttaaccaactagacccaaggataaatagaagagccttcactgaggaagaagaagagaggctaatgcaagctcataggctttatggtaacaaatgggcgatgatagcgaggcttttccctggtaggactgataattctgtgaagaaccattggcatgttataatggctcgcaagtttagggaacaatcttcttcttaccgtaggaggaagacgatggtttctcttaagccactcattaaccctaatcctcacattttcaatgattttgaccctacccggttagctttgacccaccttgctagtagtgaccataagcagcttatgttaccagttccttgcttcccaggttatgatcatgaaaatgagagtccattaatggtggatatgttcgaaacccaaatgatggttggcgattacattgcatggacacaagaggcaactacattcgatttcttaaaccaaaccgggaagagtgagatatttgaaagaatcaatgaggagaagaaaccaccatttttcgattttcttgggttggggacggtgtga

SEQ ID NO: 272 - protein, 332 aa, Arabidopsis thaliana
  G2424 polypeptide
MRMEMVHADVASLSITPCFPSSLSSSSHHHYNQQQHCIMSEDQHHSMDQTTSSDYFSLNIDNAQHLRSYYTSHREEDMNPNLSDYSNCNKKDTTVYRSCGHSSKASVSRGHWRPAEDTKLKELVAVYGPQNWNLIAEKLQGRSGKSCRLRWFNQLDPRINRRAFTEEEEERLMQAHRLYGNKWAMIARLFPGRTDNSVKNHWHVIMARKFREQSSSYRRRKTMVSLKPLINPNPHIFNDFDPTRLALTHLASSDHKQLMLPVPCFPGYDHENESPLMVDMFETQMMVGDYIAWTQEATTFDFLNQTGKSEIFERINEEKKPPFFDFLGLGTV

SEQ ID NO: 273 - DNA, 1044 bp, Arabidopsis thaliana
  G2436
atgttgaaagaagagagtaatgagagtggtacttgggcacgagcatgtgacacttgtcgttcagccgcctgcactgtctactgtgaagccgactctgcctacttgtgcaccacctgtgatgctcgagttcacgcagccaaccgtgttgcttctcgccatgaacgtgttcgtgtctgtcagtcatgtgagtctgccccagctgcgtttttgtgtaaagcagacgctgcgtctctttgtacagcttgtgatgcagagattcattccgcaaacccactagctagacgtcatcagcgagttccgattcttccattatctgcaaactcttgcagctccatggccccaagtgagactgatgctgataacgatgaggatgatcgagaggttgcttcgtggttactccctaatccagggaaaaacatcggtaatcagaataatgggttcttgtttggtgttgagtaccttgatcttgtggattacagctccagcatggacaaccaattcgaagataatcagtacactcactaccagaggagctttggaggagatggagttgtgccgcttcaagttgaagaatcaacaagtcacctgcaacaaagccaacaaaactttcagttgggtatcaactatggattctcctcaggagctcactacaacaacaactccttaaaggacctaaaccatagcgcatccgtttcatcaatggacatcagtgttgtgccagagtcaactgcaagtgacataacagtccaacacccaagaactactaaagagacgatagaccaactatctggtcctcctactcaggtggtgcaacagcttactccaatggagagggaggctagggtcctgagatacagagagaagaagaagacaaggaaatttgacaagacaataagatatgcttcaagaaaggcatatgcagagataagaccacggatcaagggcagattcgcaaagaggatagaaactgaagctgaggctgaagaaatcttctcaacatcgctaatgtctgagactggatatggaattgtcccttccttctaa

SEQ ID NO: 274 - protein, 347 aa, Arabidopsis thaliana
  G2436 polypeptide
MLKEESNESGTWARACDTCRSAACTVYCEADSAYLCTTCDARVHAANRVASRHERVRVCQSCESAPAAFLCKADAASLCTACDAEIHSANPLARRHQRVPILPLSANSCSSMAPSETDADNDEDDREVASWLLPNPGKNIGNQNNGFLFGVEYLDLVDYSSSMDNQFEDNQYTHYQRSFGGDGVVPLQVEESTSHLQQSQQNFQLGINYGFSSGAHYNNNSLKDLNHSASVSSMDISVVPESTASDITVQHPRTTKETIDQLSGPPTQVVQQLTPMEREARVLRYREKKKTRKFDKTIRYASRKAYAEIRPRIKGRFAKRIETEAEAEEIFSTSLMSETGYGIVPSF

SEQ ID NO: 275 - DNA, 1002 bp, Arabidopsis thaliana
  G2442
tcgaccaatttagaccattccaaattcgtcgtccttttctctgtgtagtctaattatatattacaagtagatgaattggttacctgaagctgaagctgaggagcacttgaaaggtattctctctggtgatttctttgatggtctcaccaatcaccttgattgcccacttgaagacatcgattccaccaatggtgagggagattgggtcgccaggtttcaagaccttgagcctcctcccttggatatgttccctgctttgccttctgacctcacctcttgtcccaagggcgccgctcgtgtgcggattcccaacaacatgattcctgctttgaagcagtcctgttcttctgaagccttgtccggcattaatagcactccccaccaatcttcagctcctcctgatatcaaagtttcatatctatttcagtctctaactccagtgtcagttctcgagaacagttatggttctctctccacccaaaactccggatctcagagattggctttccctgtgaaaggcatgagaagcaagcgcagacgccccacaacagtgagacttagctaccttttcccctttgaacccagaaagtcaactccgggtgaatcagtaaccgagggttactattcttctgagcaacatgccaagaagaagcgcaagattcatctgatcacccacaccgagtcttccactttggagtcaagtaagtcggatgggatagtccggatatgcactcattgtgagacaatcacgaccccacagtggaggcaaggacccagtggacccaagaccctctgcaacgcttgcggagtccggttcaaatctggtcgcctagttccagaataccggccagcctcaagcccgaccttcatcccatctgtgcattcaaactcacacaggaagatcattgagatgagaaagaaggacgacgagtttgataccagcatgattcgcagtgatatccagaaggtaaagcaggggaggaagaaaatggtataaaagta

SEQ ID NO: 276 - protein, 308 aa, Arabidopsis thaliana
  G2442 polypeptide
MNWLPEAEAEEHLKGILSGDFFDGLTNHLDCPLEDIDSTNGEGDWVARFQDLEPPPLDMFPALPSDLTSCPKGAARVRIPNNMIPALKQSCSSEALSGINSTPHQSSAPPDIKVSYLFQSLTPVSVLENSYGSLSTQNSGSQRLAFPVKGMRSKRRRPTTVRLSYLFPFEPRKSTPGESVTEGYYSSEQHAKKKRKIHLITHTESSTLESSKSDGIVRICTHCETITTPQWRQGPSGPKTLCNACGVRFKSGRLVPEYRPASSPTFIPSVHSNSHRKIIEMRKKDDEFDTSMIRSDIQKVKQGRKKMV

SEQ ID NO: 277 - DNA, 1122 bp, Arabidopsis thaliana
  G2443
atgttgaaacaagagagtaacgacataggtagtggagagaacaacagggcacgaccctgtgacacatgccggtcaaacgcctgcaccgtgtattgccatgcagattctgcctacttgtgcatgagctgtgatgctcaagttcactctgccaatcgcgttgcttcccgccataaacgtgtccgggtctgcgagtcatgtgagcgtgctccggctgcttttttgtgtgaggcagatgatgcctctctatgcacagcctgtgattcagaggttcattctgcaaacccacttgctagacgccatcagcgagttccaattctaccaatttctggaaactctttcagctccatgaccactactcaccaccaaagcgagaaaacaatgaccgatccagagaagagactggtggtggatcaagaggaaggtgaagaaggtgataaggatgccaaggaggttgcttcgtggctgttccctaattcagacaaaaataacaataaccaaaacaatgggttattgtttagtgatgagtatctaaaccttgtggattacaactcgagtatggactacaaattcacaggtgaatacagtcaacaccaacaaaactgcagcgtaccacagacgagctacgggggagatagagttgttccgcttaaacttgaagaatcaaggggccaccagtgccataaccaacagaattttcagttcaatatcaaatatggctcctcagggactcactacaacgacaatggttccattaaccataacgcatacatttcatccatggaaactggtgttgtgccggagtcaacagcatgtgtcacaacagcttcacacccaagaacgcccaaagggacagtagagcaacaacctgaccctgcaagccagatgataacagtaacacaactcagtccaatggacagagaagccagggtcctgagatacagagagaagaggaagacaaggaaatttgagaagacaataaggtatgcttcgaggaaggcatatgcagagataagaccgcgggtcaatggccggttcgcaaagagagaaatcgaagccgaggagcaagggttcaacacgatgctaatgtacaacacaggatatgggattgttccttcattctga

SEQ ID NO: 278 - protein, 373 aa, Arabidopsis thaliana
  G2443 polypeptide
MLKQESNDIGSGENNRARPCDTCRSNACTVYCHADSAYLCMSCDAQVHSANRVASRHKRVRVCESCERAPAAFLCEADDASLCTACDSEVHSANPLARRHQRVPILPISGNSFSSMTTTHHQSEKTMTDPEKRLVVDQEEGEEGDKDAKEVASWLFPNSDKNNNNQNNGLLFSDEYLNLVDYNSSMDYKFTGEYSQHQQNCSVPQTSYGGDRVVPLKLEESRGHQCHNQQNFQFNIKYGSSGTHYNDNGSINHNAYISSMETGVVPESTACVTTASHPRTPKGTVEQQPDPASQMITVTQLSPMDREARVLRYREKRKTRKFEKTIRYASRKAYAEIRPRVNGRFAKREIEAEEQGFNTMLMYNTGYGIVPSF

SEQ ID NO: 279 - DNA, 849 bp, Arabidopsis thaliana
  G2467
atggacccgtcgtcaagctccagagcacggtcaatgccaccgccggtgcctatggagggattgcaggaagcagggccttctccttttctaacaaagacgttcgagatggttggtgatccaaacacaaaccacattgtgtcttggaacaggggaggcatcagttttgtcgtgtgggatccacattccttctcggccactattctgcctctatacttcaagcacaacaacttctccagctttgtcagacaacttaacacttatggattcagaaagatcgaggcagagagatgggagtttatgaatgaaggtttcttgatgggtcagagggaccttctcaaaagcatcaagcgacgaacctcctcttcttcccctccttcgcttaactactctcagtctcagcccgaggctcatgacccaggcgtcgagcttccgcagctccgagaagagaggcatgtcctaatgatggagatctcgacgctcagacaggaggagcaaagagcgagaggctacgtccaagccatggagcagaggattaatggagcagagaagaaacagaggcatatgatgtccttcttgaggcgtgcggtggagaatccttcccttctgcagcagattttcgagcagaagagagaccgagaggaggccgcgatgattgatcaggctggcttgatcaaaatggaagaggtggagcacctgtcggagctggaggctctggcgcttgagatgcaaggatatggacggcaacggactgatggtgtggagagggagcttgacgacgggttttgggaagagttactcatgaacaatgaaaactccgacgaagaagaggcgaatgtgaagcaagattag

SEQ ID NO: 280 - protein, 282 aa, Arabidopsis thaliana
  G2467 polypeptide
MDPSSSSRARSMPPPVPMEGLQEAGPSPFLTKTFEMVGDPNTNHIVSWNRGGISFVVWDPHSFSATILPLYFKHNNFSSFVRQLNTYGFRKIEAERWEFMNEGFLMGQRDLLKSIKRRTSSSSPPSLNYSQSQPEAHDPGVELPQLREERHVLMMEISTLRQEEQRARGYVQAMEQRINGAEKKQRHMMSFLRRAVENPSLLQQIFEQKRDREEAAMIDQAGLIKMEEVEHLSELEALALEMQGYGRQRTDGVERELDDGFWEELLMNNENSDEEEANVKQD

SEQ ID NO: 281 - DNA, 1217 bp, Arabidopsis thaliana
  G2504
gcgtacgacgactctctctctctctctcctcttctctgtatagtcgaattatattacaagttagatagatagcatgaattggttacctgaagctgaagctgaggatgacttcaaaggtcttctctctggtgatttctttgatgatctcatcaatcaccttgacgtccctcttgatgacattgataccaccaatggtgaaggagattgggttgacaggtttcaagaccttgagcctcctcccatggatatgttccccactttgccttctgacctcacctcttgcggctctggcatggccaaggcccctcgtgtggatattcaaaggaacattcctgctttgaaacagtcctattcttctgaagccttgtccagcactctccaccaatcttcagctcctcctgaaatcaaagtttcgaaactatttcagtctttaagtccagtgtcagttctcgagaacagttatggttctctctcgacccacaacaatggatctcagagattggctttccctgtgaaaggcatgagaagcaagcgcaaacgccccacaacactgagacttagctaccttttcccctctgaaccccgaaagcccgagaagtcaaccccgggcaaacctgaatccgagtgttacttttcttctgagcaacatgccaagaagaaacgcaagatccacctgaccacccgcacggtctcttccactctggaggcaagcaactcggatgggatagtccgcaaatgcactcattgcgagacaaccaagaccccacagtggagggaaggacccagtggaccgaagaccctctgcaatgcttgcggagtgaggttcagatctggtcgcctagttccagaataccgaccagcctcaagccccaccttcatcccagctgtgcattcaaactcacacaggaagatcattgagatgagaaggaaggacgacgaacagtttgatagcagcatgattcgggcagtgatatccagagggtaaaagcagttttttttttaaagtttggtctctgatccgcagaaatgggaagtcagtggaggaagaagatggtataaaagtagggtttagtgactgttttcaaatctgatgaagagagtttagtggtttagttcaagttagggatatgaaatattttgttgtttcattatgtgtttttatctttatctcttggctgacatttgtgtatcagaggaaaacaggtgaagccaaagtt

SEQ ID NO: 282 - protein, 303 aa, Arabidopsis thaliana
  G2504 polypeptide
MNWLPEAEAEDDFKGLLSGDFFDDLINHLDVPLDDIDTTNGEGDWVDRFQDLEPPPMDMFPTLPSDLTSCGSGMAKAPRVDIQRNIPALKQSYSSEALSSTLHQSSAPPEIKVSKLFQSLSPVSVLENSYGSLSTHNNGSQRLAFPVKGMRSKRKRPTTLRLSYLFPSEPRKPEKSTPGKPESECYFSSEQHAKKKRKIHLTTRTVSSTLEASNSDGIVRKCTHCETTKTPQWREGPSGPKTLCNACGVRFRSGRLVPEYRPASSPTFIPAVHSNSHRKIIEMRRKDDEQFDSSMIRAVISRG

SEQ ID NO: 283 - DNA, 832 bp, Arabidopsis thaliana
  G2512
aacttagtgccacttagacacaataagaaaaccgttaacaagaagaaaaaaaaaagatcgaaaatggaatatcaaactaacttcttaagtggagagttttccccggagaactcttcttcaagctcatggagctcacaagaatcattcttgtgggaagagagtttcttacatcaatcatttgaccaatccttccttttatctagccctactgataactactgtgatgacttctttgcatttgaatcatcaatcataaaagaagaaggaaaagaagccaccgtggcggccgaggaggaggagaagtcatacagaggagtgaggaaacggccgtgggggaaattcgcggccgagataagagactcaacgaggaaagggataagagtgtggcttgggacattcgacaccgcggaggcggcggctctcgcttatgatcaggcggctttcgctttgaaaggcagcctcgcagtactcaatttccccgcggatgtcgttgaagaatctctccggaagatggagaatgtgaatctcaatgatggagagtctccggtgatagccttgaagagaaaacactccatgagaaaccgtcctagaggaaagaagaaatcttcttcttcttcgacgttgacatcttctccttcttcctcctcctcctattcatcttcttcgtcttcttcttctttgtcgtcaagaagtagaaaacagagtgttgttatgacgcaagaaagtaatacaacacttgtggttcttgaggatttaggtgctgaatacttagaagagcttatgagatcatgttcttgataatctctgcttctacaatttttatgtaatttga

SEQ ID NO: 284 - protein, 244 aa, Arabidopsis thaliana
  G2512 polypeptide
MEYQTNFLSGEFSPENSSSSSWSSQESFLWEESFLHQSFDQSFLLSSPTDNYCDDFFAFESSIIKEEGKEATVAAEEEEKSYRGVRKRPWGKFAAEIRDSTRKGIRVWLGTFDTAEAAALAYDQAAFALKGSLAVLNFPADVVEESLRKMENVNLNDGESPVIALKRKHSMRNRPRGKKKSSSSSTLTSSPSSSSSYSSSSSSSSLSSRSRKQSVVMTQESNTTLVVLEDLGAEYLEELMRSCS

SEQ ID NO: 285 - DNA, 975 bp, Arabidopsis thaliana
  G2534
atggataatataatgcaatcgtcaatgccaccgggattccgatttcatccgacagaggaagagcttgtgggttattacctagataggaagatcaattcaatgaagagtgctttagatgtcattgtagagattgatctctacaaaatggagccatgggatatacaagcgaggtgtaaactagggtatgaagagcaaaacgagtggtacttctttagtcataaggacaggaagtaccctaccgggactaggaccaaccgagccactgcggctgggttctggaaagccacgggtagagacaaggcggtactatcaaaaaacagtgtcatcggaatgcggaagacacttgtctactacaagggtcgagctcctaatggaagaaagtccgattggatcatgcacgaataccgtctccaaaactccgagcttgccccggttcaggaggaaggctgggtggtgtgtcgagcatttaggaagccaattccaaaccagaggccattagggtacgagccatggcagaaccagctctaccacgtcgaaagtagtaacaactactcatcttcagtgacaatgaacacgagtcatcatatcggtgcatcttcatcaagtcataaccttaatcaaatgctcatgagcaataaccactacaatcctaataatacatcctcatcgatgcatcaatatggcaacattgagctcccgcagttggacagcccgagcttgtcgcctagtttagggacgaataaagatcagaacgagagtttcgagcaagaagaagagaagagctttaactgtgtggattggagaacactagataccttgcttgagacacaagtcatacatccgcataaccctaatattcttatgttcgaaacgcagtcgtataatccggcgccaagcttcccttccatgcatcaaagctataatgaggtcgaagctaatattcatcattctcttggatgcttccctgactcgtaa

SEQ ID NO: 286 - protein, 324 aa, Arabidopsis thaliana
  G2534 polypeptide
MDNIMQSSMPPGFRFHPTEEELVGYYLDRKINSMKSALDVIVEIDLYKMEPWDIQARCKLGYEEQNEWYFFSHKDRKYPTGTRTNRATAAGFWKATGRDKAVLSKNSVIGMRKTLVYYKGRAPNGRKSDWIMHEYRLQNSELAPVQEEGWVVCRAFRKPIPNQRPLGYEPWQNQLYHVESSNNYSSSVTMNTSHHIGASSSSHNLNQMLMSNNHYNPNNTSSSMHQYGNIELPQLDSPSLSPSLGTNKDQNESFEQEEEKSFNCVDWRTLDTLLETQVIHPHNPNILMFETQSYNPAPSFPSMHQSYNEVEANIHHSLGCFPDS

SEQ ID NO: 287 - DNA, 1008 bp, Arabidopsis thaliana
  G2578
atgggtcgggtgaaattagaaatcaagagaatagagaacacaacgaatcgacaagttacgttttcaaaacgtagaaatggtttgattaagaaagcttatgaattgtcgattctttgtgatatcgacattgctcttatcatgttctctccttctgatcgccttagccttttctccggaaaaactcggattgaagacgttttttcaagattcatcaatcttcctaaacaagaacgagagagtgctctatactttcctgaccagaatagacgcccagatattcaaaacaaagagtgtctactaaggattctgcagcaactcaagactgaaaatgacatcgctcttcaagtcacgaaccctgcagctatcaactctgacgtcgaggaacttgagcatgaagtttgtaggttacaacaacaactccaaatggcagaagaagaactaaggagatacgaaccggatccaataagattcacgaccatggaggaatacgaagtttctgagaagcaacttctcgacactctaacacatgttgtccaacggcgagaccatctcatgagcaaccatttatcttcgtatgaagcatctactatgcaaccaaacattggtggtccttttgtaaatgacgtcgttgaaggttggctacctgaaaatgggaccaatcaaacccatttgtttgatgcatcggcccattctaaccaactcagagaattatcatcggcaatgtatgaaccattgttgcaaggaagtagctcaagctcgaaccaaaacaacatgagtgaatgccacgtgacgaaccacaatggtgaaatgttccctgagtgggctcaggcgtattcatcctcggccttattcgcttctatgcagcaacagcatgaaggtgtgggtcccagtatagaagagatgatgccagctcagcagagtgatattccgggagtgacggcggagacacaagttgatcatgaagtctccgactatgaaacaaaggttcctcaactcagtagccaataa

SEQ ID NO: 288 - protein, 335 aa, Arabidopsis thaliana
  G2578 polypeptide
MGRVKLEIKRIENTTNRQVTFSKRRNGLIKKAYELSILCDIDIALIMFSPSDRLSLFSGKTRIEDVFSRFINLPKQERESALYFPDQNRRPDIQNKECLLRILQQLKTENDIALQVTNPAAINSDVEELEHEVCRLQQQLQMAEEELRRYEPDPIRFTTMEEYEVSEKQLLDTLTHVVQRRDHLMSNHLSSYEASTMQPNIGGPFVNDVVEGWLPENGTNQTHLFDASAHSNQLRELSSAMYEPLLQGSSSSSNQNNMSECHVTNHNGEMFPEWAQAYSSSALFASMQQQHEGVGPSIEEMMPAQQSDIPGVTAETQVDHEVSDYETKVPQLSSQ

SEQ ID NO: 289 - DNA, 591 bp, Arabidopsis thaliana
  G2629
atgaacacgattccagccgaactcactggatacttccactatctaccaccagataaatataataaccaaacaccaatcatggagtctgagtacttcaacatgccctcttctcctacttcttgttcctccttctaccacctcaatggtctgatcaacaacaacaactactcttcatcatccaatggtcaggatctaatgacgagcaacaactcaacttcagacgaagatcaccaacaaagtatggtcatcgatgagaggaaacaaaggagaatgatctctaacagggaatctgctcgtaggtcaagaatgagaaagcagagacatctcgatgagctttggtctcaagtgataagacttcgcactgataaccactgtcttatggataagctgaaccgcgtatctgaaagccatgagcttgctttaaaggagaacgctaagcttaaagaggaaacttctgatctcagacagctgatctctgagataaagtcacacaacgaagacgacaacagttttttaagagagctcgaagattcgatatcaaactctagatcggattcgaaccaaagcggcagagattttgagttgtgttaa

SEQ ID NO: 290 - protein, 196 aa, Arabidopsis thaliana
  G2629 polypeptide
MNTIPAELTGYFHYLPPDKYNNQTPIMESEYFNMPSSPTSCSSFYHLNGLINNNNYSSSSNGQDLMTSNNSTSDEDHQQSMVIDERKQRRMISNRESARRSRMRKQRHLDELWSQVIRLRTDNHCLMDKLNRVSESHELALKENAKLKEETSDLRQLISEIKSHNEDDNSFLRELEDSISNSRSDSNQSGRDFELC

SEQ ID NO: 291 - DNA, 918 bp, Arabidopsis thaliana
  G2635
atgagttcgtctaacggaggtgtaccgcctggttttcggtttcatccaacggacgaagaacttcttcattactacttgaagaagaagatttcttatgaaaagtttgagatggaagtcatcaaagaggttgatttgaacaagattgagccgtgggatttacaagatagatgcaaaataggatcaacgccacaaaatgagtggtatttcttcagccacaaggataggaaatatccgacagggtcaaggacaaaccgtgcaacccactccggtttttggaaggcgacaggacgtgacaaatgcataagaaattcttacaagaagatcggcatgaggaagactcttgtattctacaaaggaagagctcctcatggccaaaagacagattggatcatgcacgagtaccgtatcgaagacactgaagatgacccttgtgaagatggatgggttgtttgtagagtgttcaagaagaaaaatctgttcaaagtagggaatgatgttggctcaaacatcagcaataataggcttgaagctcgtagtttcatccgaagagaaagcccttaccaaggaatctcaatgtttgagcttaacaagcctgaagagattagtgttcatcaatatcctcaaccaccaatgtttcaacctcatcacaagcctctttcaataggctatgactattcattggctcttctaccaagagaaagcgagtaccaacaagcgtgtcagccatcaggggttgaggttggcacgtgcaaggcagtaagtgaatggggaatagtgaattgtaacatggtgagtcatgaggactcgtctagagcgatgaggtttgaagatgacggtaacaacacttcttccacggtccagccaccttctaatctgctttcattgcgcggtgaaaatggatttcttgggttgttttaa

SEQ ID NO: 292 - protein, 305 aa, Arabidopsis thaliana
  G2635 polypeptide
MSSSNGGVPPGFRFHPTDEELLHYYLKKKISYEKFEMEVIKEVDLNKIEPWDLQDRCKIGSTPQNEWYFFSHKDRKYPTGSRTNRATHSGFWKATGRDKCIRNSYKKIGMRKTLVFYKGRAPHGQKTDWIMHEYRIEDTEDDPCEDGWVVCRVFKKKNLFKVGNDVGSNISNNRLEARSFIRRESPYQGISMFELNKPEEISVHQYPQPPMFQPHHKPLSIGYDYSLALLPRESEYQQACQPSGVEVGTCKAVSEWGIVNCNMVSHEDSSRAMRFEDDGNNTSSTVQPPSNLLSLRGENGFLGLF

SEQ ID NO: 293 - DNA, 252 bp, Arabidopsis thaliana
  G2718
atgaatacgcagcgtaagtcgaagcatcttaagaccaatccaaccattgttgcctcttcttctgaagaagtgagcagtcttgagtgggaagaaatagcaatggctcaggaagaagaggatttgatttgcaggatgtataagcttgtcggtgaaaggtgggatttaatagctgggaggattccaggaagaacagcagaagagattgagaggttttgggtgatgaagaatcatcgaagatctcaattacgttga

SEQ ID NO: 294 - protein, 83 aa, Arabidopsis thaliana
  G2718 polypeptide
MNTQRKSKHLKTNPTIVASSSEEVSSLEWEEIAMAQEEEDLICRMYKLVGERWDLIAGRIPGRTAEEIERFWVMKNHRRSQLR

SEQ ID NO: 295 - DNA, 1140 bp, Arabidopsis thaliana
  G2893
aaatcataaaagcctctctcttagtctatttttatctcacggctctctctcccctctctacacacacaaacacaaataaagcgtaaaactgaaatattttaattacaattagaaagagaacatattaatatgtcaaatataacaaagaagaagtgtaatggaaatgaagagggtgcagagcagaggaaagggccttggacactcgaggaagacactcttctcaccaattacatttcccataacggtgaaggccgatggaatctgctcgctaaatcttctgggctaaagagagcaggaaaaagttgtagattgagatggttgaattaccttaaacccgacataaagcgtgggaatctcactcctcaagaacaacttttaatccttgagctccattctaaatggggtaataggtggtcaaaaatttcgaagtatttaccaggaagaacagacaacgatatcaaaaactactggagaactagagtccagaaacaagcacgccagctcaacatagattccaatagccacaagttcatagaagttgttcgtagcttttggtttccaagactgatcaacgagattaaagacaactcatacaccaacaatattaaagctaatgctcctgatttacttggaccaattttacgagacagcaaagatttgggtttcaacaacatggattgttccacttccatgtcagaagatctcaagaaaacttcacaattcatggatttttctgatcttgaaaccacaatgtccttggaaggatcacgagggggtagtagtcaatgtgtgagtgaggtttatagctccttcccttgcctagaggaggagtacatggtggccgttatgggcagttcagacatttcagcattgcatgattgtcacgtggctgattccaagtacgaggatgatgtgacacaagatctaatgtggaacatggatgacatttggcagtttaacgagtatgcacactttaattaggttatattatatttatgtacttcttacaacttggaggggtttatcggtcttttattaaattttgattgttttggattccttaaaaatgtgttcttattatagtttttaatgaaaaaaatgtttaagcgcaaaaaaaaaaaaaaaaaaaaaaaaaaaaaa

SEQ ID NO: 296 - protein, 283 aa, Arabidopsis thaliana
  G2893 polypeptide
MSNITKKKCNGNEEGAEQRKGPWTLEEDTLLTNYISHNGEGRWNLLAKSSGLKRAGKSCRLRWLNYLKPDIKRGNLTPQEQLLILELHSKWGNRWSKISKYLPGRTDNDIKNYWRTRVQKQARQLNIDSNSHKFIEVVRSFWFPRLINEIKDNSYTNNIKANAPDLLGPILRDSKDLGFNNMDCSTSMSEDLKKTSQFMDFSDLETTMSLEGSRGGSSQCVSEVYSSFPCLEEEYMVAVMGSSDISALHDCHVADSKYEDDVTQDLMWNMDDIWQFNEYAHFN

SEQ ID NO: 297 - DNA, 1253 bp, Arabidopsis thaliana
  G3034
gcttaaaggtctctttcatggagctgtttcctgctcagcccgatttatccttacaaataagtccaccaaacagtaaaccatcatcgacatggcagagaagaagatcaacaacagatcaagaagatcatgaagaactcgatttagggttttggagaagagctcttgattcaagaacatcttctctcgtctctaattccacctcaaaaacaatcaatcatccattccaagacctctcgctctctaacatctctcatcatcaacaacaacaacaacatcatcatccacaacttctccctaattgcaacagctctaacatcttgacctctttccaatttccgacacagcagcaacaacaacacttacaagggtttcttgctcacgaccttaatactcacttaagaccaataagaggaataccactttaccacaaccctcctccacatcatcatcctcaccgtccgccaccgccatgtttccctttcgacccgtcgtctctaataccctcttcctccacttcctcgccggctctaaccggaaacaacaatagctttaatactagtagcgttagtaaccctaattaccacaatcatcatcaccagactctaaacagagccagattcatgccaagattcccagctaaacgaagcatgagagctcctaggatgcgatggaccaccactcttcatgcccggttcgttcacgccgttgaattactcggtggccatgaaagagcaacacctaaatcagttcttgagctcatggatgtcaaagatctaaccttggctcatgttaagtcccatttacagatgtacagaacagtgaagacaaccgacaaagcagcagcttcgtcaggacaatctgatgtctatgaaaatggatcatcaggagataataactcagacgactggatgttcgatatgaatagaaaatcgagagatagcgaggaattgacgaatcctctagagaaatcaaatggtctatggaccaattcttccggagaagcacgtttgcatgggaagttaatcgataatgttgcagaaattatgctaccttctgagaaggaactagatggaaagtgctcaagttatgagagaatatcatcagaagagatgagctcatcaagcatctcgggaacaagccctttcaagccaaatcttgagtttactctgggtcgatctcactaaatttattgttgtagctaggtagtaattaattagtatcaattaacttatattttggctactgactagttt

SEQ ID NO: 298 - protein, 388 aa, Arabidopsis thaliana
  G3034 polypeptide
MELFPAQPDLSLQISPPNSKPSSTWQRRRSTTDQEDHEELDLGFWRRALDSRTSSLVSNSTSKTINHPFQDLSLSNISHHQQQQQHHHPQLLPNCNSSNILTSFQFPTQQQQQHLQGFLAHDLNTHLRPIRGIPLYHNPPPHHHPHRPPPPCFPFDPSSLIPSSSTSSPALTGNNNSFNTSSVSNPNYHNHHHQTLNRARFMPRFPAKRSMRAPRMRWTTTLHARFVHAVELLGGHERATPKSVLELMDVKDLTLAHVKSHLQMYRTVKTTDKAAASSGQSDVYENGSSGDNNSDDWMFDMNRKSRDSEELTNPLEKSNGLWTNSSGEARLHGKLIDNVAEIMLPSEKELDGKCSSYERISSEEMSSSSISGTSPFKPNLEFTLGRSH

SEQ ID NO: 299 - DNA, 579 bp, Oryza sativa (japonica cultivar-group)
  G3380
ggtccgatccgtaacagtagtagctagttaatttgattattgtccgtccgcggccggtcagtggtcgcaatcgatcgatcgatatcatggacggcgacggcggcggcggatgggacgatcagggcaacggcggcggcgagacgaccaagtaccgtggcgtgcgtcgccggccttctggcaagttcgcggcggagatccgtgactccagcaggcagagcgtccgcgtctggctgggaaccttcgacaccgccgaggaggctgcgcgggcttacgaccgcgccgcctacgccatgcgcggccacctcgccgtcctcaacttccctgctgaggcgcgcaactacgtgcggggatcaggctcgtcgtcctcgtcccgacagcatcagcagcggcaggtgatcgagctggagtgcctagacgaccaagtgctgcaagagatgctcaagggtggcgacgatcagtacaggtcagcagctgggagcaagaggaataactactagctatatatgctgctaacctacttacaatcgcgatacatatcgaggtttggggattttcttctcacctgtgtgcagaggctgc

SEQ ID NO: 300 - protein, 136 aa, Oryza sativa (japonica cultivar-group)
  G3380 polypeptide
MDGDGGGGWDDQGNGGGETTKYRGVRRRPSGKFAAEIRDSSRQSVRVWLGTFDTAEEAARAYDRAAYAMRGHLAVLNFPAEARNYVRGSGSSSSSRQHQQRQVIELECLDDQVLQEMLKGGDDQYRSAAGSKRNNY

SEQ ID NO: 301 - DNA, 514 bp, Oryza sativa (japonica cultivar-group)
  G3381
atcgatcatctgctacgaactcaccctatatatatatactccatcttaggagctgcttgatcgatcgacatatatataactaatggatcatcatcatcagcagcagcagcaggagggtgagctggtggccaagtacaggggcgtgcggcggcggccgtggggcaaattcgcggcagagatccgcgactcgagccggcacggcgtccgcgtgtggctgggcaccttcgacacagccgaggaggccgctcgcgcctacgaccgctccgcctactccatgcgcggcgccaacgccgtcctcaacttccccgccgacgcccacatctacgcccgtcaactacacaataataacgccgctgctggctcttcatcttcctcttccgccgccgccgcagcagccaggccgccgccgatcgagttcgagtacctcgatgaccacgtcctgcaggagatgctccgagaccacaccaccaacaagtagcttactactccactatatatgctgcctgctgcttgt

SEQ ID NO: 302 - protein, 131 aa, Oryza sativa (japonica cultivar-group)
  G3381 polypeptide
MDHHHQQQQQEGELVAKYRGVRRRPWGKFAAEIRDSSRHGVRVWLGTFDTAEEAARAYDRSAYSMRGANAVLNFPADAHIYARQLHNNNAAAGSSSSSSAAAAAARPPPIEFEYLDDHVLQEMLRDHTTNK

SEQ ID NO: 303 - DNA, 375 bp, Oryza sativa (japonica cultivar-group)
  G3383
atggaggacaaccggagcaaggacacggcgaccaagtaccgcggcgtgaggaggcggccgtggggcaagttcgcggcggagatccgcgacccggagcgcggcggggcgcgcgtctggctcggcaccttcgacaccgccgaggaggcggcgcgtgcctacgaccgcgcggcctacgcccagcgcggcgccgccgccgtgctcaacttcccggccgccgccgccgccggcaggggtggaggagccggcggcgccgcttccgggtcgtcgtcgtcgtcgtccgcgcagcgcggcaggggcgacaagatcgagttcgagtacctcgacgacaaggtgctcgacgatctcctcgacgacgagaagtaccgtggtaaatga

SEQ ID NO: 304 - protein, 124 aa, Oryza sativa (japonica cultivar-group)
  G3383 polypeptide
MEDNRSKDTATKYRGVRRRPWGKFAAEIRDPERGGARVWLGTFDTAEEAARAYDRAAYAQRGAAAVLNFPAAAAAGRGGGAGGAASGSSSSSSAQRGRGDKIEFEYLDDKVLDDLLDDEKYRGK

SEQ ID NO: 305 - DNA, 321 bp, Oryza sativa (japonica cultivar-group)
  G3392
gctctaaactaccataaaatcttaactcggcattttttttttcacgctaatggaaagtagcggtggaagccagctgggaaagaattccaaaacaagtgatggtcgtgaaacaaaagaagttaatagcactgcgcaaaattttgttcatttcacagaagaagaggaagatattgttttcagaatgcacaggcttgtcgggaacaggtgggaacttatagctggaagaataccgggaaggacagcagaagaagtagagaagttctgggcaattaaacatcaagccacatgatagcagaaagaggatgtttgccccaaaagtag

SEQ ID NO: 306 - protein, 79 aa, Oryza sativa (japonica cultivar-group)
  G3392 polypeptide
MESSGGSQLGKNSKTSDGRETKEVNSTAQNFVHFTEEEEDIVFRMHRLVGNRWELIAGRIPGRTAEEVEKFWAIKHQAT

SEQ ID NO: 307 - DNA, 356 bp, Oryza sativa (japonica cultivar-group)
  G3393
cataaggtcataacaagggtctgaggatcttagctagcacaagatctcaactcggcatttcattggagtttttcacgcctaatggatagcagcagtggtagccagggaaagaattccaaaaccagtgatggttgtgaaacaaaagaagttaataacactgcacagaattttgttcatttcacggaagaagaggaagatctcgttttcagaatgcacaggcttgttgggaacaggtgggaacttatagctggaagaatccctggaagaacagcaaaagaggtagaaatgttctgggcagtaaagcaccagaatacataaggggggaaaaagggtgtatgccctaaaagtagcgtaca

SEQ ID NO: 308 - protein, 78 aa, Oryza sativa (japonica cultivar-group)
  G3393 polypeptide
MDSSSGSQGKNSKTSDGCETKEVNNTAQNFVHFTEEEEDLVFRMHRLVGNRWELIAGRIPGRTAKEVEMFWAVKHQNT

SEQ ID NO: 309 - DNA, 959 bp, Oryza sativa (japonica cultivar-group)
  G3430
ccaaattcacgggataattcaaagatgctgcttaatccggcgtcgagagaggtggccgcgctggacagcatccggcaccacctcctggaggaggaggaggagacgccggcgacggcgccggcgccgacgcggcggccggtgtactgccggagctcaagcttcggcagcctcgtggccgaccagtggagcgagtcgctgccgttccggcccaacgacgccgaggacatggtcgtgtacggcgccctccgcgacgccttctcctccggctggctccccgacggctcattcgccgccgtcaagccggagtcgcaggactcctacgacgggtcctccatcggcagcttcctcgcgtcgtcgtcgtccgaggcggggacgcccggggaggtgacgtcgacggaggcgacggtgacgccggggatcagggagggcgagggcgaggccgtggcggtggcgtcgagggggaagcactaccgcggggtgaggcagcggccgtggggcaagttcgcggcggagatcagggacccggccaagaacggcgcgcgcgtgtggctcggcacgttcgactccgccgaggaggccgccgtggcgtacgaccgcgccgcctaccgcatgcgcggctcccgcgcgctcctcaacttcccgctccgcatcggctccgagatcgccgccgcggccgccgccgccgccgcgggcaacaagcggccatatcccgacccggcgagctccggctcttcttccccttcatcctcttcctcctcgtcgtcgtcttcctcctccgggtcaccgaagcggaggaagagaggcgaggccgcggccgcgtccatggccatggcactggttccaccaccgccaccaccggcgcaggcaccggtgcagctcgccctcccggcccagccatggttcgccgccggtccgatccagcagctggtgagctaagtggcgatgtggtagtggtagtg

SEQ ID NO: 310 - protein, 303 aa, Oryza sativa (japonica cultivar-group)
  G3430 polypeptide
MLLNPASREVAALDSIRHHLLEEEEETPATAPAPTRRPVYCRSSSFGSLVADQWSESLPFRPNDAEDMVVYGALRDAFSSGWLPDGSFAAVKPESQDSYDGSSIGSFLASSSSEAGTPGEVTSTEATVTPGIREGEGEAVAVASRGKHYRGVRQRPWGKFAAEIRDPAKNGARVWLGTFDSAEEAAVAYDRAAYRMRGSRALLNFPLRIGSEIAAAAAAAAAGNKRPYPDPASSGSSSPSSSSSSSSSSSSGSPKRRKRGEAAAASMAMALVPPPPPPAQAPVQLALPAQPWFAAGPIQQLVS

SEQ ID NO: 311 - DNA, 257 bp, Zea mays
  G3431
ctaatggatagcagcagtggtagccaggacaagaaattcagagacaatgatcgccctgaagcaaaagaagctaatagcaccgcacagcatcttgttgacttcacggaagcagaggaagatcttgtttccagaatgcacaggcttgtggggaacaggtgggagattatagcaggaagaatcccaggaaggacagcagaagaggtagagatgttctggtccaaaaaataccaggaaagatgaaaccgaggccttagatt

SEQ ID NO: 312 - protein, 78 aa, Zea mays
  G3431 polypeptide
MDSSSGSQDKKFRDNDRPEAKEANSTAQHLVDFTEAEEDLVSRMHRLVGNRWEIIAGRIPGRTAEEVEMFWSKKYQER

SEQ ID NO: 313 - DNA, 268 bp, Zea mays
  G3444
cctaacccctctaatggatagcagcagtggtagccaggacaagaaattcagagacaatgatcgccctgaagcaaaagaagctaatagcaccgcacagcatcttgttgacttcacggaagcagaggaagatcttgtttccagaatgcacaggcttgtggggaacaggtgggagattatagcaggaagaatcccaggaaggacagcagaagaggtagagatgttctggtccaaaaaataccaggaaagatgaaaccgaggccttagattt

SEQ ID NO: 314 - protein, 78 aa, Zea mays; identical to SEQ ID NO: 312
  G3444 polypeptide

SEQ ID NO: 315 - DNA, 302 bp, Glycine max
  G3445
agaacttgttattgcaatgactgacatagatcgctcctctgataatgtttcttctgattctattgagaaatcaagccaagtttctgatgttgaattttctgaagctgaggaaatccttattgccatggtgtataatctggttggagaaaggtggtctttgattgctggaagaattcctggaagaactgcagaagaaatagagaaatattggacttcaagattttcgactagccaatgaagtggcagaaattaaacgaagcaagacaattttgggtgcctgcaactcattatacagtgactta

SEQ ID NO: 316 - protein, 73 aa, Glycine max
  G3445 polypeptide
MTDIDRSSDNVSSDSIEKSSQVSDVEFSEAEEILIAMVYNLVGERWSLIAGRIPGRTAEEIEKYWTSRFSTSQ

SEQ ID NO: 317 - DNA, 257 bp, Glycine max
  G3446
gagaacttgttatgcaatggctgacatagatcgctcctttgataataatgtttctgctgtttctactgagaaatcaagccaagtttcagatgttgaattttctgaagctgaggaaatccttattgccatggtgtataatctggttggggagaggtggtctttgattgctggaagaattcctggaagaactgcagaagagatagagaaatattggacttcaagattttcgactagccaatgatcggtggcagaaaacg

SEQ ID NO: 318 - protein, 74 aa, Glycine max
  G3446 polypeptide
MADIDRSFDNNVSAVSTEKSSQVSDVEFSEAEEILIAMVYNLVGERWSLIAGRIPGRTAEEIEKYWTSRFSTSQ

SEQ ID NO: 319 - DNA, 250 bp, Glycine max
  G3447
gttattgcaatggctgacatagatcgctcctttgataataatgtttctgctgtttctactgagaaatcaagccaagtttcagatgttgaattttctgaagctgaggaaatccttattgccatggtgtataatctggttggggagaggtggtctttgattgctggaagaattcctggaagaactgcagaagagatagagaaatattggacttcaagattttcgactagccaatgatcggtggcagaaaacg

SEQ ID NO: 320 - protein, 74 aa, Glycine max; identical to SEQ ID NO: 318
  G3447 polypeptide

SEQ ID NO: 321 - DNA, 264 bp, Glycine max
  G3448
attctccacgcctccttgcaatggctgactcggatctctcttcaagtcaaatttctacacattctactgattcaggaaatcgagggtcttccaaagttgaattttctgaagatgaggaaaccctcatcatcaggatgtataaactggtaggggagaggtggtctataattgctggaaggattcctggaagaacagcagaggaaatagagaagtattggacttcaagattctcgggctctagtgaatgaagctccggagtactac

SEQ ID NO: 322 - protein, 75 aa, Glycine max
  G3448 polypeptide
MADSDLSSSQISTHSTDSGNRGSSKVEFSEDEETLIIRMYKLVGERWSIIAGRIPGRTAEEIEKYWTSRFSGSSE

SEQ ID NO: 323 - DNA, 268 bp, Glycine max
  G3449
actcttctagctccttgcaatggctgactcggatcgctcttctagtgaagtttctacacattctactgattcagggaagcgagggtcttccaaagttgaattttctgaagatgaggaaactcttatcatcaggatgtataaactggtaggggagaggtggtctttaattgctggaaggattcctggaagaacagcagaggaaatagagaagtattggacttcaagattctcaggttctagtgaatgaggtgccaagagttctactacc

SEQ ID NO: 324 - protein, 75 aa, Glycine max
  G3449 polypeptide
MADSDRSSSEVSTHSTDSGKRGSSKVEFSEDEETLIIRMYKLVGERWSLIAGRIPGRTAEEIEKYWTSRFSGSSE

SEQ ID NO: 325 - DNA, 285 bp, Glycine max
  G3450
cagctcagaaggcaaagatagatccatgtccaccaccgcaactacaacctctgaagaagttagcagcaatgagtggaaagtcatacacatgagcgagcaagaggaggatctcattcgcaggatgtacaagctagtcggggacaagtggaatttgatagctggtcgcattcccggtcgtaaagcagaagaaatagagagattctggattatgagacacggcgatgctttttctgttaaaagaaacggaagtaaaacccaagactcgtgattttctctggtcatgta

SEQ ID NO: 326 - protein, 80 aa, Glycine max
  G3450 polypeptide
MSTTATTTSEEVSSNEWKVIHMSEQEEDLIRRMYKLVGDKWNLIAGRIPGRKAEEIERFWIMRHGDAFSVKRNGSKTQDS

SEQ ID NO: 327 - DNA, 1105 bp, Zea mays
  G3490
gccatctgttcaaaataaatatatatataatcgtcgtcatgcatatttcgatttttcgaatcgtgcgaaactagcttgtctgttgtgtttacttatatatattctgaaagtactccgtattttctggagtcaagaacagcatactgtattttctgtgatttttaaaggagctaacttggctatatatgaacaaccgatggttgttgcttggcggccgcagaggggtttggatgcaacaacaacaacgggagcgggaacgggtaacaacatgagggacctggacatgaaccagccggcgagcggcggcgaggaggaggagttcccaatggggagcgtggaggaggaggaggacgagcgcggcggcgccggcgggccgcaccgcgccaagaagctccggctgtccaaggagcagtcccgcctcctggaggagagcttccgcctcaaccacaccctcacaccgaagcaaaaggaggccttggctgtcaagctcaagctgcggcccaggcaggtggaggtctggttccagaaccgcagggctaggacgaagcttaagcagacggagctggagtgcgagtacctgaagcgctgcttcggctcgctgaccgaggagaaccggcggctgcagcgggaggtggaggagctgcgcgcgatgcgggtggccccgcccaccgtgctctccccgcacacccggcagccgctcccggcgtccgcgctcgccatgtgcccgcgctgcgagcgcatctccgccgcaacggccggcgcgcaccccacgcccggcgcccgccgcgagccccttccacccgcgccgcccgtccgcggcgttttagcctagtctcccgctgcatgcgactccggccggtaggggaaggagcggaaagtttggttgttgttagggggggcaaagtgtttgtgctgtgtaaatttgatgatggatggagaaaaccagcgcgggcccgtgtagctttttaggtgtaggtggtagggtttcgaccttggagtcccttcgcgtcaacgtccccgtccccgtgttccgttccatgccgtgcatgctgatggatcaaaagtttgtactagcttcctatcgtcgtcactccattcagaatga

SEQ ID NO: 328 - protein, 211 aa, Zea mays
  G3490 polypeptide
MVVAWRPQRGLDATTTTGAGTGNNMRDLDMNQPASGGEEEEFPMGSVEEEEDERGGAGGPHRAKKLRLSKEQSRLLEESFRLNHTLTPKQKEALAVKLKLRPRQVEVWFQNRRARTKLKQTELECEYLKRCFGSLTEENRRLQREVEELRAMRVAPPTVLSPHTRQPLPASALAMCPRCERISAATAGAHPTPGARREPLPPAPPVRGVLA

SEQ ID NO: 329 - DNA, 466 bp, Oryza sativa (japonica cultivar-group)
  G3515
gtgtgcgagcggttgcgtccgcatggaggacgacaagagtaaggaggggaaatcgtcgtcgtcgtaccgcggcgtgcggaagcggccgtggggcaagttcgcggcggagatccgcgacccggagcgcgggggagcccgcgtgtggctcggcacgttcgacaccgcggaggaggccgcgcgggcgtacgaccgcgccgcattcgccatgaagggcgccacggccatgctcaacttcccgggagatcatcatcacggcgccgcaagcaggatgaccagcaccggctcttcttcgtcctccttcaccacgcctcctccggcgaactcctccgcggcggcgggccgcggcggctccgatcggacgacggacaaggtggagctggagtgcctcgacgacaaggtcctggaggacctcctcgcggagaccaactatcgtgataagaactactagctagctagctactatggc

SEQ ID NO: 330 - protein, 141 aa, Oryza sativa (japonica cultivar-group)
  G3515 polypeptide
MEDDKSKEGKSSSSYRGVRKRPWGKFAAEIRDPERGGARVWLGTFDTAEEAARAYDRAAFAMKGATAMLNFPGDHHHGAASRMTSTGSSSSSFTTPPPANSSAAAGRGGSDRTTDKVELECLDDKVLEDLLAETNYRDKNY

SEQ ID NO: 331 - DNA, 393 bp, Zea mays
  G3516
atggaggacgacaagaaggagggcaagtaccgcggcgtgcggaagcggccgtggggcaagttcgccgcggagatccgggacccggagcgcggcggctcccgcgtctggctcggcaccttcgacaccgccgaggaggccgccagggcctacgaccgcgccgcattcgccatgaagggcgccacggccgtgctcaacttccccgccagcggaggatcgtcagctggcgcggctcccggcggccggaccagcggcggctcctcctcgtccaccacgtcggctccggccagcagggggagggcccgtgttcccgactcggagaaggtggagctggagtgcctcgacgacagggtcttggaagagctgctcgcggaagacaagtacaacaagaactaa

SEQ ID NO: 332 - protein, 130 aa, Zea mays
  G3516 polypeptide
MEDDKKEGKYRGVRKRPWGKFAAEIRDPERGGSRVWLGTFDTAEEAARAYDRAAFAMKGATAVLNFPASGGSSAGAAPGGRTSGGSSSSTTSAPASRGRARVPDSEKVELECLDDRVLEELLAEDKYNKN

SEQ ID NO: 333 - DNA, 477 bp, Zea mays
  G3517
tacgtccgatccacagccatcatcgccacccgcgcgcttatggatggcgagtggtccaaggacggcggaggcggcgagccgaccaagtaccgcggcgtgcggcgtcggccctggggcaagtacgcggcggagatccgcgactcgagccggcacggcgtccgcatctggctcggcacgttcgacaccgccgaggaggccgccagggcgtacgaccgctccgccaactccatgcgcggcgccaacgccgtgctcaacttcccggaggacgcgcccgcctacgccgccgccgcctcccgtggctccgccggcggatcctcgtccagaccggcgggctccggccgggacgtgatcgagtttgagtacctcgacgacgaggtgctgcaggagatgctcaggagccaggagccgtcggcggcggcggcgcagaagaagaagtagcgcgagcgccacaggtggcgaaacggccgcttttccaaa

SEQ ID NO: 334 - protein, 132 aa, Zea mays
  G3517 polypeptide
MDGEWSKDGGGGEPTKYRGVRRRPWGKYAAEIRDSSRHGVRIWLGTFDTAEEAARAYDRSANSMRGANAVLNFPEDAPAYAAAASRGSAGGSSSRPAGSGRDVIEFEYLDDEVLQEMLRSQEPSAAAAQKKK

SEQ ID NO: 335 - DNA, 717 bp, Glycine max
  G3518
ctaacacacataacaataacttagcaacattttttccttccttctttctttctttctatactttttgttgttaattctaagttctaagagaagaaaaatggagggtggaagatcatcagtttcaaatgggaatgttgaggttcgttatagagggattagaagaaggccatggggaaagtttgcagcagagattcgtgaccctacaaggaaaggaacaaggatatggcttggaacatttgacactgctgaacaagctgcacgagcttatgatgctgctgcttttcattttcgtggccacagagcaattctcaacttcccaaatgagtatcaatctcataatccaaactcttctttgcctatgcctctagctgtgtcagctcctccttcttattcttcttcttcttccacttctaattattccggtgatgataataataaccaccttgtgagaccagctttttctggagaaataatgcaaggtggtgatcatgatgatgatacttttgagttggagtacttcgataataagttgctcgaggaactccttcagatgcaagataacagacacttctaaaagtaaaatataacacaagccagctatgttgtgttagtcactggcatgaaataaaatgcaaagaaatattgttgattttatttaatatattttgtttgatttttttttttttttttgtagctgatcaaagttcttcgaaatga

SEQ ID NO: 336 - protein, 158 aa, Glycine max
  G3518 polypeptide
MEGGRSSVSNGNVEVRYRGIRRRPWGKFAAEIRDPTRKGTRIWLGTFDTAEQAARAYDAAAFHFRGHRAILNFPNEYQSHNPNSSLPMPLAVSAPPSYSSSSSTSNYSGDDNNNHLVRPAFSGEIMQGGDHDDDTFELEYFDNKLLEELLQMQDNRHF

SEQ ID NO: 337 - DNA, 609 bp, Glycine max
  G3519
tttctttctttctatactttttgtggttctgattattaagttctaagagaataacaatggagggtggaagatcatctgtttcaaatgggaattgtgaggttcggtatagagggattagaagaaggccatggggcaagtttgcagcagagattcgtgaccctacgaggaaagggacaaggatatggcttggaacatttgacactgcggaacaagctgctcgagcttatgatgctgctgcttttcattttcgtggtcatagagcaattctcaacttcccaaatgagtaccaatctcataatccaaactcttctttgcctatgcctctaattgtgcctcctccttcttattcttcttctttcacttctaattattctgctgatgataataaccaccttgtgagacctggagaaataatgcaaggtggtgatcttgatgacacttttgagttggagtacttggataataagttgctcgaggaactccttcagatgcaagataacagacacttctaaaagtaaaatataacacaagccagctatgttgtgttagtcactggcatgaaataaaatgcaaagaaatattgttgattttatttaatatattttgttt

SEQ ID NO: 338 - protein, 151 aa, Glycine max
  G3519 polypeptide
MEGGRSSVSNGNCEVRYRGIRRRPWGKFAAEIRDPTRKGTRIWLGTFDTAEQAARAYDAAAFHFRGHRAILNFPNEYQSHNPNSSLPMPLIVPPPSYSSSFTSNYSADDNNHLVRPGEIMQGGDLDDTFELEYLDNKLLEELLQMQDNRHF

SEQ ID NO: 339 - DNA, 440 bp, Glycine max
  G3520
aaggcacacaatggaagaggagtcaaaggagaaaaagaaggacactaaggaggaaccacgttatagaggagtgcggcggcggccgtgggggaagttcgcggccgagattcgggacccggcccggcacggtgcccgagtgtggctggggacatttctcacggcggaggaggctgctagggcttatgaccgagctgcctatgagatgaggggcgctttagccgttctcaattttccaaatgagtatccttcatgctcttctatgaactcatcttcaacattagcaccttcatcttcttcttcaaattcaatgcttaaaagtgatcatggtaaacaagttattgagttcgagtgcttggatgacaaattgttagaggaccttcttgattgtgatgactatgcctacgagaaagacttgcctaagaactgaacggtttgatcaa

SEQ ID NO: 340 - protein, 138 aa, Glycine max
  G3520 polypeptide
MEEESKEKKKDTKEEPRYRGVRRRPWGKFAAEIRDPARHGARVWLGTFLTAEEAARAYDRAAYEMRGALAVLNFPNEYPSCSSMNSSSTLAPSSSSSNSMLKSDHGKQVIEFECLDDKLLEDLLDCDDYAYEKDLPKN

SEQ ID NO: 341 - DNA, 1096 bp, Glycine max
  G3524
tgcttcttctgtcttccttttcatgtgtgtctccttctgtttctccactttaccttttttctctcctttttgttgatccccctcttcctcttcttcatctcacatcatttttttcttcatccctttcattgttttctgtgtgttttctatggcggttttaccaagtagctcctcaagcttggaattgaccatatctgtacctggttttgcttcttcaccaacccttcttccctcatcatctgtgaaagaattggacataaatcaagtacctcttgaagaagattggatggcatcaaacatggaagatgaagaagaaagcagcaatggagaacctcctcgaaagaaactccgtctcacaaaggaacaatctcgtctccttgaagaaagctttagacaaaaccacacgttgaacccaaagcagaaagagtctttggcaatgcaactgaagctgcgaccaaggcaagtggaggtgtggtttcagaaccgtagggccaggagcaagctgaagcagacagagatggagtgcgagtacctcaagaggtggttcggttccctcacagagcagaaccggaggctccagagggaagtggaggagctgcgagccattaaggtgggcccacccaccgtgatctcccctcactcctgcgaaccgctcccggcctccacactttccatgtgtccccgctgcgagcgtgtcacctccaccgccgacaaaccgccctccgccgcggccactttgtccgctaaagtgccgccaactcaatcccgccaaccctccgcggcctgttgaccctataactatagtccatcgcctactctgcacgccacctctactacctcatcatctaattaatcagaaacagggcacaaacttaactaaactttacaaaactaaaaagttagtgtgaatgaagatataatatgtgttagaaaaaataatgtttttttttttttttttactaaaagggcgttttcggatagggaaacttttgtagttagtagtagtactttcaatggtcaatgcgtatctgattattgggctttcatattgactttctcctttttcaaatatggatagaacttttatttaaaaaaa

SEQ ID NO: 342 - protein, 213 aa, Glycine max
  G3524 polypeptide
MAVLPSSSSSLELTISVPGFASSPTLLPSSSVKELDINQVPLEEDWMASNMEDEEESSNGEPPRKKLRLTKEQSRLLEESFRQNHTLNPKQKESLAMQLKLRPRQVEVWFQNRRARSKLKQTEMECEYLKRWFGSLTEQNRRLQREVEELRAIKVGPPTVISPHSCEPLPASTLSMCPRCERVTSTADKPPSAAATLSAKVPPTQSRQPSAAC

SEQ ID NO: 343 - DNA, 1082 bp, Glycine max
  G3643
ccacgcgtccgcttcttctctcagaatacacaacacaaagtcaatataattatagtatatccctatgagtaggagttcggcgatgcatggaattacaagcacaaacaacaagttgaagggagttcggcgtcgaaaatggggcaaatgggtgtcggagattcgtgttccgggcacgcaagagcgtttgtggttgggaacctacgccacgccggaggctgccgcggtggctcacgacgttgccgtctactgtctaagtaggccttcttcgttggacaaacttaacttccccgaaaccttgtcttcgtacagtgttcagctcagggacatgtctccgaggtctgtgcagaaggtggcttccgatgttggcatggatgttgatgcaagaaacattgttgcgggcaaaacttcaacggtgggggcagaaactaattgcgagagtgatgagaggactagtactgcgtctgtgtgtaatgttgttggagaaggtggtgctgatcattcggatgtgttttggtgggatgatgatggtgggtcttggcatggaagtggtggagattctacggaaagggatgccttgagcatttccattgaagattatctttagctgttctaggtttcaactttagttatctttttttttttttttttgagttatgatcgatgcgcatagttagtagttacagataattactgctagtgttgggtgtttaaacggtcagagatgatgatatataaatttgatgtgcgctagctgcctttttgaagaaactaaaaaaaggtaaaacaagaaagattgtacccccaaaatgaacttggtcaatttcacactttcacgccatttgcattttgtgcacgttgttagttttcaaattgttaattcccttgctaaacccactcaaacttgagtgcgttcaccttttattaccacgtagtaactgagagttaacgaaaatatttctttataaaaattatttaccatttagtgtctttcgtttacttgtaattattcaacttgtcaataagatgaaagttctaattttagatataataaaattcagctagtatttgtgaattactcactt

SEQ ID NO: 344 - protein, 179 aa, Glycine max
  G3643 polypeptide
MSRSSAMHGITSTNNKLKGVRRRKWGKWVSEIRVPGTQERLWLGTYATPEAAAVAHDVAVYCLSRPSSLDKLNFPETLSSYSVQLRDMSPRSVQKVASDVGMDVDARNIVAGKTSTVGAETNCESDERTSTASVCNVVGEGGADHSDVFWWDDDGGSWHGSGGDSTERDALSISIEDYL

SEQ ID NO: 345 - DNA, 687 bp, Oryza sativa (japonica cultivar-group)
  G3644
atgccttttgtacgtacacttgctttcccaacgctcgcgaatcaaatcgagggtgaaattaagtcaagaacggagagagatcacggtgaggttgatctcagctcgccggaggaggcaatgagccgggcggagtgcggcggcggcgaggaggaggagcggtgcaggtacaggggcgtgcggcggcggcggtgggggaagtgggtgtcggagatccgggtgcccggcacgcgggagcggctgtggctggggtcctacgccacgccggaggccgccgccgtcgcgcacgacacggccgtctacttcctccgcggaggcgcgggcgacggcggtggcggcggcgcgacgctcaacttcccggagcgcgcggcggccacgtacggcggcggcgccgccgtggcgcgcctgtcgccgcggtccgtgcagcgcgtggcgtccgacgccggcatggccgccgacgcgcagctcgtggcggcgcgggacgccgcgcccgcgcccgcgccggcgacggcgtacgcgcgcccggatcactgcgccggcgcgacgacggcgcggcacgacgagctggcgcgccgcgggatgtacggcgctcacgcgcatgccgccggcgcgaacgccaggacgagcggcgagcggcagctcgtctgtgccgaggagattagcgtggatgacatggagatcctgatgtaa

SEQ ID NO: 346 - protein, 228 aa, Oryza sativa (japonica cultivar-group)
  G3644 polypeptide
MPFVRTLAFPTLANQIEGEIKSRTERDHGEVDLSSPEEAMSRAECGGGEEEERCRYRGVRRRRWGKWVSEIRVPGTRERLWLGSYATPEAAAVAHDTAVYFLRGGAGDGGGGGATLNFPERAAATYGGGAAVARLSPRSVQRVASDAGMAADAQLVAARDAAPAPAPATAYARPDHCAGATTARHDELARRGMYGAHAHAAGANARTSGERQLVCAEEISVDDMEILM

SEQ ID NO: 347 - DNA, 656 bp, Brassica rapa subsp. Pekinensis
  G3645
cccacgcgtccgatggattacatcgacaacaccgtcgaaactcaatcaaagtacaaaggcatccgtcgccggaaatgggggaaatgggtatcggagattcgagttccgggaactcgcgaccgtctctggttaggctcattctccacggcggaaggcgcagccgtggcgcacgacgtggctttctactgtttacaccaaccaaactcgctcgaatctctcaacttccctcacttgcttcctccttccattgtttccaagacttcgccgaggtctatccagcaagctgcttctaatgccggaatggccgttgacgccggaatcgttaacagctgtgatcacgcgtcagggaactctgggaatggagatacaacgacggcgtattgtgagaatggaggtgcgttgaatatatcagtgtatgattatttggacggtcacgatcacgtttgaacttcatcttcttgttttttcgtttaaagatacagctactcaaaagaagcagtgatggagcctggtgtgtaagcaagcaaaacgttgtgaatatatataccggtatgtttcgctgttggcccaatgcaagaaacttttgtagtacgaatatatatattttattttgaatgccttcaagaggattataatgcgagtgaagctttgtttca

SEQ ID NO: 348 - protein, 144 aa, Brassica rapa subsp. Pekinensis
  G3645 polypeptide
MDYIDNTVETQSKYKGIRRRKWGKWVSEIRVPGTRDRLWLGSFSTAEGAAVAHDVAFYCLHQPNSLESLNFPHLLPPSIVSKTSPRSIQQAASNAGMAVDAGIVNSCDHASGNSGNGDTTTAYCENGGALNISVYDYLDGHDHV

SEQ ID NO: 349 - DNA, 649 bp, Brassica oleracea
  G3646
cagccgcataacatattactattccccctggtcatatctttgacttttatttttatttgctctaacctaaaagtattatataagtattgcacaattcatacaatcggaattgactttcttctcctccaatcgtatttttattcaacagttcctctcaagatcatcaactcaaaaaatggatcctagagacggcggagaaacccatcaggccaagtacaaaggcatccgtcgccggaaatggggaaaatgggtatcggagattagggttccagcaactcgtgaacgactctggttaggctctttctccaccgccgaaggagctgcggtagcccacgacgtcgctttttactgcttgcaccgaccatcttctctcgacaacgaagcttttaacttccctcacttgctgcaaccttcccttgcctccaacacatctcctaagtccatacaaaaagctgcttcggacgcaggcatgggcgtagacgcaggattcgccctaaacaacgacagcgcgagtggtggcgtggaggaaggcaccgaacgggaaacgttgaacatctccgtgtacgattatctagacgacggtcgcatttgatatattggtttatatctacgagcaccttatattagtaattaatataggatgtgaata

SEQ ID NO: 350 - protein, 138 aa, Brassica oleracea
  G3646 polypeptide
MDPRDGGETHQAKYKGIRRRKWGKWVSEIRVPATRERLWLGSFSTAEGAAVAHDVAFYCLHRPSSLDNEAFNFPHLLQPSLASNTSPKSIQKAASDAGMGVDAGFALNNDSASGGVEEGTERETLNISVYDYLDDGRI

SEQ ID NO: 351 - DNA, 495 bp, Zinnia elegans
  G3647
attcgcggccgcgaatatgagtaccagctcagatgaaggtaacaactgtttaagccaaaagacttacaaaggcgttaggtgccgacgatggggcaaatgggtgtcagagattcgagttccaggaagtcgagaacggctctggctaggcacgtactctacgcctgagggtgcagctgtggctcatgatgtagcctcgtactgtttaaaagggaatacgtcttttcataaacttaatattccgtctatgttacctccgacagcacggacagacctatctcctaggtccatccaaaaggctgcgtctgatgctggtatggccatagacgcacggtttatcgcgtctagagataccacaccgactaatgaggcgttgaacatttctgtagatgattatctttaaattttgagaactaatattgtgtcaccaatattgtaagtcgatctacattggcaaacacaatgtacgtgtttggtggcacttccagattattgttt

SEQ ID NO: 352 - protein, 127 aa, Zinnia elegans
  G3647 polypeptide
MSTSSDEGNNCLSQKTYKGVRCRRWGKWVSEIRVPGSRERLWLGTYSTPEGAAVAHDVASYCLKGNTSFHKLNIPSMLPPTARTDLSPRSIQKAASDAGMAIDARFIASRDTTPTNEALNISVDDYL

SEQ ID NO: 353 - DNA, 594 bp, Oryza sativa (japonica cultivar-group)
  G3649
atgggccgggtggcggcgagcggcggcggcggcggcggaggggagatgatgaggtacaggggcgtgcggcggcggcggtgggggaagtgggtgtcggagatccgggtgcccgggacgcgggagcgcctgtggctcggctcctacgccaccgccgaggccgccgccgtcgcgcacgacgccgccgtctgcctcctccggctcggcggcggccgccgcgccgccgcaggcggaggcggcgggctcaacttccccgcccgcgcgctcgccgcggcggcggccgcctcctcctacggcggcgccggcggtctcctgtccccgcgctccgtgcagcgcgtggcgtccgacgccggcatggccgccgacgcgcagctcgtggacctgcgccgcgaccacccgcccgccgccgccgccgcctcatcctccggcagcggcgtggcgggagacggtgcaagaaagcaagggacacgtggcgaggttagcgacacgtattggtgtaggaatggagaggatgggagcagaagccggagctccgggagtgaggagctcattgtttacgagggcttaagtgtagatgacatggaaattttgatgtaa

SEQ ID NO: 354 - protein, 197 aa, Oryza sativa (japonica cultivar-group)
  G3649 polypeptide
MGRVAASGGGGGGGEMMRYRGVRRRRWGKWVSEIRVPGTRERLWLGSYATAEAAAVAHDAAVCLLRLGGGRRAAAGGGGGLNFPARALAAAAAASSYGGAGGLLSPRSVQRVASDAGMAADAQLVDLRRDHPPAAAAASSSGSGVAGDGARKQGTRGEVSDTYWCRNGEDGSRSRSSGSEELIVYEGLSVDDMEILM

SEQ ID NO: 355 - DNA, 702 bp, Oryza sativa (japonica cultivar-group)
  G3651
atggctgacctcccatgcatatatatacgcgtagtacgtacacttgctttcccaacgctcgcgaatcaaatcgagggtgaaattaagtcaagaacggagagagatcacggtgaggttgatctcagctcgccggaggaggcaatgagccgggcggagtgcggcggcggcgaggaggaggagcggtgcaggtacaggggcgtgcggcggcggcggtgggggaagtgggtgtcggagatccgggtgcccggcacgcgggagcggctgtggctggggtcctacgccacgccggaggccgccgccgtcgcgcacgacacggccgtctacttcctccgcggaggcgcgggcgacggcggtggcggcggcgcgaccgctcaacttcccggagcgcgcggcggccaccgtacggcggccgccgtggcgcgcctgtcgccgcggtccgtgcagcgcgtggcgtccgacgcggcatggccgccgacgcgcagctcggcgtgccgggacccggcccggcccgcgccggcgacggcgtacgcgcgcccggatcactgcgccggcgcgacgacggcgcggcacgacgagctggcgcgccgcgggatgtacggcgctcacgcgcatgccgccggcgcgaacgccaggacgagcggcgagcggcagctcgtctgtgccgaggagattagcgtggatgacatggagatcctgatgtaa

SEQ ID NO: 356 - protein, 233 aa, Oryza sativa (japonica cultivar-group)
  G3651 polypeptide
MADLPCIYIRVVRTLAFPTLANQIEGEIKSRTERDHGEVDLSSPEEAMSRAECGGGEEEERCRYRGVRRRRWGKWVSEIRVPGTRERLWLGSYATPEAAAVAHDTAVYFLRGGAGDGGGGGATAQLPGARGGHRTAAAVARLSPRSVQRVASDAAWPPTRSSACRDPARPAPATAYARPDHCAGATTARHDELARRGMYGAHAHAAGANARTSGERQLVCAEEISVDDMEILM

SEQ ID NO: 357 - DNA, 1146 bp, Zea mays
  G3656
ggcggtgaagatggaggcggagcaagcggcgatggcggcgccgcagctgggggcggcgcaccagcagacgcagccgcggcggcagtaccgcggcgtgcgcatgcgcaagtggggcaagtgggtggcggagatccgggagccgcacaagcgcacgcgcccccgcctccggtcctacgccacggccgtggcggcggcgcgcgcctacgacacggccgtgttctacctgcccggcccgtcggcgcggctcaacttccccgaggagatcccctcgttcgggctggcggatggcgtggacgtgggggagcacgcgcgcgacccggccgccgccgccgccggcggcggcggcggctgcacgctgtccgcggcgtccatacggaagaaggccatcgaggtggggtcccgcgtggacgcgctccagaccggcatggtggtcccgccgccgcaccaccgcgagcgccataggcaccacaaccacctgccgcagctgcgggtgcacgcggaggagcagcaggaggaagaggagcagaagccgcagcggcctgcgtggagcgggcgcgtcaagaacccggatctgaaccgtgcgccgagccccgagagctccgacgccgagtgacaagcgagcgagagcgcagcagcagccaccgcaaggcgaggttcaacgacgacgtccgttatcggttattcccaatcccacgacgcagcatgccgttgtcgtctccgtccgaccgtccccacgtacgtacgtacgtacgtacacgacgatccagctgaccctgccgcctgcctatcctatccgtcctcgacgacgaccggatggtcggcgggcgggagggagggcggtgcggcgagggttttgggtacgttgtggataagcacgagggcagcagcagcaggggcggcgtgcgcgggcaggcaggcgaagacggagggaggcggccacaagcggcggtctttccaaacgtcaaaaaggacagctgtaacagcgataagaaaaaacaagtcatcatcaccctcgtctcactactagttctactactgttcccgagagtagtagtaacgattagcactccactagcagtatgattattcgaatcggccttgcttgacagcgattaaaaaaaaaaaaaaaaaaaaaaaaaaaaaaaa

SEQ ID NO: 358 - protein, 200 aa, Zea mays
  G3656 polypeptide
MEAEQAAMAAPQLGAAHQQTQPRRQYRGVRMRKWGKWVAEIREPHKRTRPRLRSYATAVAAARAYDTAVFYLPGPSARLNFPEEIPSFGLADGVDVGEHARDPAAAAAGGGGGCTLSAASIRKKAIEVGSRVDALQTGMVVPPPHHRERHRHHNHLPQLRVHAEEQQEEEEQKPQRPAWSGRVKNPDLNRAPSPESSDAE

SEQ ID NO: 359 - DNA, 783 bp, Brassica oleracea
  G3659
caaaaatataatggcggcagaatccgactacattttgcttgagtcgataagacgacacttactaggagaatcggagtcgtggctcagtgagtcgacggcgagttcggtggttcaatctggtacgacggccaaaccggtgtacggaagaaaccctagcttcagcaagttgtacccttgcttcactgagagctggggacacttgccgttgaaagaaaacgacacggaggacatgttagtctacggtatcctcaacgacgcgtttcacggcggatgggaaccgtcgtcttcatcctccgacgaagaccagagctctaattttccgaaggttaaaaccgagaacttcacggtggtcgatcatgttccggcgaagaaggcgagtccggttaaggctccggagaaggggaagcattacagaggagtgaggcagaggccgtgggggaagttcgcggcggagataagggatccggcgaagaacggagctagggtttggttggggacgtttgagacggcggaagatgcagcgttggcttacgacagagctgctttcaggatgcgtggttcccgcgctcttttgaattttcctttgagggttaactcaggtgaacctgacccggttcgggttaagtcaaagagaggttcttcctctgaaatcggaggttcgaagcggagaagaacggtggcttctgtaaacggcggcggtcaaggaacagatatggggttgatggtcaagtgtgaggtggttgaagtgagacgtgacgatcatttacttgtcttatagttttt

SEQ ID NO: 360 - protein, 255 aa, Brassica oleracea
  G3659 polypeptide
MAAESDYILLESIRRHLLGESESWLSESTASSVVQSGTTAKPVYGRNPSFSKLYPCFTESWGHLPLKENDTEDMLVYGILNDAFHGGWEPSSSSSDEDQSSNFPKVKTENFTVVDHVPAKKASPVKAPEKGKHYRGVRQRPWGKFAAEIRDPAKNGARVWLGTFETAEDAALAYDRAAFRMRGSRALLNFPLRVNSGEPDPVRVKSKRGSSSEIGGSKRRRTVASVNGGGQGTDMGLMVKCEVVEVRRDDHLLVL

SEQ ID NO: 361 - DNA, 703 bp, Brassica oleracea
  G3660
tctgtaataataatgtacggacatggcgagataaccacggcagcagaatcagattacgctttgctggagtcaatacgacgtcacttgctaggtggagacaacgagttacgattcagtgagtcaataccgagttcatgtttcactcagagttggggagacttgccattgaaagagaacgactccgaggatatgttagtgtacagtgtcctcaacgacgccttcaacggagcctttgaaacgtcgtcgccgtcgtcggacttgagctgtctcagcgattttaacgattttccggcggttaaaatggaaacttcggagaacttagcagcggaggcggaaaaaatgaaggcggtggcggcgccgccgtcaaagggaaagcattacagaggggtgagacagaggccgtgggggaaattcgcggcggagatacgtgatccggcgaaaaaaggagcgagggaatggttagggacgtttgagacggcggaagatgcagctttggcttacgatagagctgcttttaggatgcgtggttcccgcgctttgttgaattttccgttgagggttaactccggtgaacctgacccggtaaggatcaagtcaaagaggtcttataagtcttcttcgtcgtcctcttctgaaaacgggaagccgaagcagaggagaagaacagagaacgtgccatagttcaggtgaagggcgatgttgt

SEQ ID NO: 362 - protein, 222 aa, Brassica oleracea
  G3660 polypeptide
MYGHGEITTAAESDYALLESIRRHLLGGDNELRFSESIPSSCFTQSWGDLPLKENDSEDMLVYSVLNDAFNGAFETSSPSSDLSCLSDFNDFPAVKMETSENLAAEAEKMKAVAAPPSKGKHYRGVRQRPWGKFAAEIRDPAKKGAREWLGTFETAEDAALAYDRAAFRMRGSRALLNFPLRVNSGEPDPVRIKSKRSYKSSSSSSSENGKPKQRRRTENVP

SEQ ID NO: 363 - DNA, 839 bp, Zea mays
  G3661
caggatgctgctgaacccggcgtcagaggcgtcggtgctagacaccatccggcagcacctcctcgaggagccagccgacgagagcttcgggagcctggtggcggaccagtggagcggctcgctcccgttccgcaccgacgacgccgacgacatggtggtgttcggggcgctgcaggacgccttcgcctacggctggctgcccgacggctcattcgtgcacgtgaagcccgagccggtgcggtcccccgactcgtcctcctacccctgctcctacgacggctcaccctgcttcggcctcctggacccggagccgccgctgacgcccggcaccaccacgcccagtagtagggggcaggaggaggccgcggcggccatggcccggggcaagcactacaggggggtgaggcagcgcccgtggggcaagttcgcggcggagatcagggaccccgccaggaacggcgcgcgcgtctggctcggcacgtacgacaccgccgaggacgccgcgctcgcctacgaccgcgccgcctaccgcatgcgcggctcgcgcgcgctcctcaacttcccgctccgcatcggctccggggacaagcgcccgtcgccggcgccgcccgagcccgccacctcctcggactcctcctcgtcttcggccagcggctcgcacaagaggcggaagcgaggcgaggccgcggctgccaacatggccatggcgctggtgcccccgccctcccagcttaaccggccggcccagccgtggttccctgccgcgccggtcgagcaggcggcgatggctccgcgcgtggagcagatcgtcgtctagtctagccatgcgccggagaaat

SEQ ID NO: 364 - protein, 270 aa, Zea mays
  G3661 polypeptide
MLLNPASEASVLDTIRQHLLEEPADESFGSLVADQWSGSLPFRTDDADDMVVFGALQDAFAYGWLPDGSFVHVKPEPVRSPDSSSYPCSYDGSPCFGLLDPEPPLTPGTTTPSSRGQEEAAAAMARGKHYRGVRQRPWGKFAAEIRDPARNGARVWLGTYDTAEDAALAYDRAAYRMRGSRALLNFPLRIGSGDKRPSPAPPEPATSSDSSSSSASGSHKRRKRGEAAAANMAMALVPPPSQLNRPAQPWFPAAPVEQAAMAPRVEQIVV

SEQ ID NO: 365 - DNA, 798 bp, Glycine max
  G3717
ggagaccaccggagatatgtacggacggagtgattcttacgaatccgatttggcgcttctggattcgattcgccgccacttgctgggagagtccgaattgatattcggagccccgaatttcggttcgggtcggagctccagtttcagcagcttggactcgtgtttgagtgatgattggggagagcttccgtttaaggaggacgattcagaagatatggtgttgtacggcgttctccgtgacgcagttaatgtggggtgggtcccatccctcgatgccggctcgcccgagagcgtctcgtcgggttttccggcggtgaagctggagcctgatgtcatgccggcgttgattaatccgtgtccgcctccggcgccggcggtggaggagaagaaggttgttccgccgaaggggaagcactaccgcggcgtgcggcagcggccgtggggaaagttcgcggcggagatccgggacccggcgaagaacggggctagggtttggctggggacgtttgagacggcggaggacgcggcgttggcgtacgaccgcgccgcctaccggatgcgagggtcgagggcgctgctgaattttccgttgagggttaactccggcgagccagatccggtgagggtgacgtcgaagcggtcgtcgtcgccggaaagtatggcggcggcggcgccgaagagaaagaaagttatggtggtggggacggtgcaagagcaagtggggagtcaagtggtggagtgtacacgtggcgaacagttattggttagctgagagagattctaaaattggtattgtgt

SEQ ID NO: 366 - protein, 251 aa, Glycine max
  G3717 polypeptide
MYGRSDSYESDLALLDSIRRHLLGESELIFGAPNFGSGRSSSFSSLDSCLSDDWGELPFKEDDSEDMVLYGVLRDAVNVGWVPSLDAGSPESVSSGFPAVKLEPDVMPALINPCPPPAPAVEEKKVVPPKGKHYRGVRQRPWGKFAAEIRDPAKNGARVWLGTFETAEDAALAYDRAAYRMRGSRALLNFPLRVNSGEPDPVRVTSKRSSSPESMAAAAPKRKKVMVVGTVQEQVGSQVVECTRGEQLLVS

SEQ ID NO: 367 - DNA, 1013 bp, Glycine max
  G3718
cacgaaatgtacggacaaagtagctatgagtccgatttggcccttttggactccattcgccgccacttactcggcgactccgaggaacacagattcggagccccgaatgttaattcgggtagcactccattgtactctcggagctccagtttcggcaggttgtacccttgcctgagtaacgattggggcgaacttcctcttatggaagacgattcagaagacatgcttctttatggtgttcttcgcgacgccgtgaacgtaggctgggtcccatctctcgacgcttcctcaccggagagtttctcgtcggctttcatgccgccggtgaccgtgaaatccgaaacggatctatttccggcaccggaaccgatttgtaaccctccggtggttcagggcccggcgccggcggtagttccggcgaaagggaagcactaccggggcgtgcggcagcgaccgtggggaaaattcgcagcggagatccgcgacccggctaaaaatggggctcgggtttggcttgggacttttgagacggctgaggacgccgcgctggcttacgatcgagccgcgtatcgaatgcgcggctcgcgggctttgttgaattttccgctccggattaattcgggcgagcccgaaccggttcgagttacggcgaagcgggcttcagcagaaccgtgttcttcgtcggagagtggatcttgggtgaagaagcggaagaaggtggtgggttgagaacggggcacgtggagagcagttgttggtgaagtaatttgtgatgctaaaaaggggtggaataaatgggttggcatgctcactcattgctcaagtgggactgtgggactgatcaaatctaaagctaaaaaagaaaacaaaccacatttggaaaaactgattagggtcgaggttctgtttggctttgtgaatacagttacaagatttcttattttttggttcaattctataataatatctgtaacatagttgggtagggcacccaccctgtgctgaactaagtt

SEQ ID NO: 368 - protein, 240 aa, Glycine max
  G3718 polypeptide
MYGQSSYESDLALLDSIRRHLLGDSEEHRFGAPNVNSGSTPLYSRSSSFGRLYPCLSNDWGELPLMEDDSEDMLLYGVLRDAVNVGWVPSLDASSPESFSSAFMPPVTVKSETDLFPAPEPICNPPVVQGPAPAVVPAKGKHYRGVRQRPWGKFAAEIRDPAKNGARVWLGTFETAEDAALAYDRAAYRMRGSRALLNFPLRINSGEPEPVRVTAKRASAEPCSSSESGSWVKKRKKVVG

SEQ ID NO: 369 - DNA, 653 bp, Medicago truncatula
  misc_feature (605)..(605): n is a, c, g, or t
  misc_feature (610)..(610): n is a, c, g, or t
  misc_feature (615)..(615): n is a, c, g, or t
  misc_feature (625)..(625): n is a, c, g, or t
  misc_feature (647)..(647): n is a, c, g, or t
  misc_feature (652)..(652): n is a, c, g, or t
  G3735
ctaatccttcatactaaagaaaacatagacttataacaaaaatattattatttacttcgtatatttttgtgtttcaaattaatggagggagatcataaattagtttcaaattcaacaaatggaaatggaaatggaaatggaaattcagatcaaataaagtatagaggaattcgtagaagaccatggggaaaatttgcagcagaaattcgtgacccaacaaggaaagggacaagaatatggcttggaacatttgatactgctgaacaagctgcaagagcttatgatgctgctgcttttcattttcgtggtcatagagctattctcaatttccctaatgaatatcaagctcctaattcatcttcttcattacctatgcctcttactatgcctccaccaccttcttctaatccacctccttcttcttcttcttcttcctctttttcttcttacaccgttgatgatggttttgatgagcttgaattcttggataataagttgcttcaagaacttcttcaagatggaacacaatagttaactattgaagatcaagtggcatgaaatgtattggtggtcatttaattttctcttcattaatttattttggnttggntatgnatctcatttntatgaataaatgagaatggggnattana

SEQ ID NO: 370 - protein, 149 aa, Medicago truncatula
  G3735 polypeptide
MEGDHKLVSNSTNGNGNGNGNSDQIKYRGIRRRPWGKFAAEIRDPTRKGTRIWLGTFDTAEQAARAYDAAAFHFRGHRAILNFPNEYQAPNSSSSLPMPLTMPPPPSSNPPPSSSSSSSFSSYTVDDGFDELEFLDNKLLQELLQDGTQ

SEQ ID NO: 371 - DNA, 859 bp, Triticum aestivum
  G3736
gcacgaggcttcattctccctcgttccatccaagctccaccatccatcactgatttgcacttacctagctactccgcaacccccacttccggcttcttcatttctcactactagtacgtagttgagattatggagggcggagaaggatccggtggcggcggcgagccgaccaagtaccgcggggtgcgccgcaggccgtggggcaagttcgccgcggagatccgggactcgagccggcacggcgtgcgcatgtggctcggcaccttcgacaccgccgaggaggccgcggccgcctacgaccgctccgcctactccatgcgcggccgcaacgccgtgctcaacttccccgaccgggcgcacgtctacgaggccgaggccaggcgccagggccagggctcttcgtcgtcggcgaggcagcagaatcagcagcagcagcaggggcagagcggggtgatcgagttcgagtacctggacgacgacgtgctgcagtccatgctccacgaccacgacaaatccaacaagtagatcgatggatcatccatccatccatccatggatcgatccataatacctactgtatcatcccggcccggccggcaacatcgacctgcgtgcatgcgcgggcgcggatgcaatctacactacctacctatgcattccggccatatattaggtacgtagattatatgtgtacgagagcctacgagctcgatgaagatcgtacgtggtgcattctgatgcatgaggattccatcgacacgaccctctaccatatatttgatgggtcgatcgagtaatttgcagccagtaatccaatcgatgatatggggttttcaaaaaaaaaaaaaaaaaaaaaaaa

SEQ ID NO: 372 - protein, 131 aa, Triticum aestivum
  G3736 polypeptide
MEGGEGSGGGGEPTKYRGVRRRPWGKFAAEIRDSSRHGVRMWLGTFDTAEEAAAAYDRSAYSMRGRNAVLNFPDRAHVYEAEARRQGQGSSSSARQQNQQQQQGQSGVIEFEYLDDDVLQSMLHDHDKSNK

SEQ ID NO: 373 - DNA, 882 bp, Oryza sativa (japonica cultivar-group)
  G3737
acacatgcatcgatcattcatggatgccgaattgccgcgatccgggcattatttcgcgccaggagacccaagatcatcgtgtcgcccacgctataaatagctagctagcttgcctttatgttgcatatgccaactgctacatgcaggacgtctgaaactatcattagtgacctgcagcgcctgcagtatatatatacaagtagtagtgagcatggaggacgacaagaaggaggcggcgagcaagtaccgcggcgtacggaggcggccgtggggcaaattcgcggcggagatccgcgacccggagcgcggcggctcacgcgtctggcttggcacgttcgacaccgccgaggaggccgcgcgagcgtacgaccgcgccgcattcgccatgaagggcgctatggccgtgctcaacttcccaggcaggacgagcagcaccggctcttcgtcgtcatcgtcatccacgccgccagctccggtgacgacgagccgccactgcgccgacacgacggagaaggtggagcttgtgtaccttgacgacaaggtgctcgacgagctccttgcggaggactacagctaccgcaacaacaacaactactgatccggccgtcgatgaactgagacggatcgacatggggccggtcgtcggtacgctcgctgaaacgagacccggattgctatcaataagcaagcagaagaaaaccgtctcctatatatagcttcttctgttggcacaagcatatatgggcatgcatgacacatgctactgtgaattgacgggtgtgtgctgtgtgcagactactaaaccacgcttgcaagttgcacgtacgacgtggttgtcaagagcatgcagtccacgaagcagagaaaaacacctggtttatc

SEQ ID NO: 374 - protein, 128 aa, Oryza sativa (japonica cultivar-group)
  G3737 polypeptide
MEDDKKEAASKYRGVRRRPWGKFAAEIRDPERGGSRVWLGTFDTAEEAARAYDRAAFAMKGAMAVLNFPGRTSSTGSSSSSSSTPPAPVTTSRHCADTTEKVELVYLDDKVLDELLAEDYSYRNNNNY

SEQ ID NO: 375 - DNA, 899 bp, Zea mays
  G3739
cgatataattcactcctctcaacgctcgctgcacacacacaccagtgaacctagccagccatttgccgcatcgatcatcagtcgctgtcacgcgcgccaaaccaaaccaaagcccaaacccagctgcaagtgctactgacagcagctagcaaacacacacccgtcgccatcgctatggacggcgactggtccaaggacggcggaggtggagagccgaccaaatatcgcggcgtgcggcggcggccctggggcaagtacgcggccgagatccgcgactcgagccgccacggcgtccgcatctggctgggcaccttcgacaccgccgaggaggccgccagggcgtacgaccggagcgcctactccatgcgcggcgccaacgccgtcctcaacttcccggaggacgcgcacgcctacgccgccgcctgccgcggctccggatcctcctcatcctcgtccaggcataggcagcagcagcagcagggctccggcagggacgtgatcgagctcgagtacctcgacgacgaggtgctgcaggagatgctcaggaaccacgagccgtcgtcgtctgcgaggaagaagatgtaatgcaagacgactggtacacgtggcgaatgcacgttgcacatcagaatgccatgtatgcgtggggggttacgttcaattgtatgcatgcagtgcagtgactaccggccggctctcctggatatgtcggccatctctctctatatattattaaaatgtcagctcccttctctaatttggcgggagttacatcagtggtactatgcagagttgcatacttgcatatatatgcacattattaattaataactcgatctctcgtggacggtggaacagtgataatcatctcattgtcaattaattttgatcaaagaaat

SEQ ID NO: 376 - protein, 136 aa, Zea mays
  G3739 polypeptide
MDGDWSKDGGGGEPTKYRGVRRRPWGKYAAEIRDSSRHGVRIWLGTFDTAEEAARAYDRSAYSMRGANAVLNFPEDAHAYAAACRGSGSSSSSSRHRQQQQQGSGRDVIELEYLDDEVLQEMLRNHEPSSSARKKM

SEQ ID NO: 377 - DNA, 918 bp, Zea mays
  G3794
attacttgtgcacttgggtgcagtgcctgcagtataatcaagttagggtttaaaagaacctcgaccgcgatcgtatatagatccagattatcattagttattagaccactgtgatatcgatggacgacggcggcgagccaaccaagtaccgcggcgtgcggcgccggccgtcggggaagttcgccgccgagatccgcgactccagccggcagagcgtgcgcatgtggctgggcaccttcgacacggccgaggaggccgcaagggcgtacgaccgcgcggcctacgccatgcgcggccaaatcgccgtgctcaacttccccgccgaggcgcgcaactacgtgcgcggcgggtcgtcgtcgtcccgccagcagcagcagggaggaggaggaggaggaggaagtggcggcggcgccggtcagcaggtgatcgagctggagtgcctggacgatcaggtgctgcaggagatgctcaagggcggcgacgggaaaaaatagttgttagcgtatctgatcacaggtgcacgtgttgaaactgattatgaccaggcgatcgatcccatcttgtgcatgcggcctgccaaagttgctgggtcttctcatcgacctatatatatatgcttctcgatccatatatatatcataaatgcatgcagggtgcatgcatgtaccaagtttggaattataatgctcttggtgctgaattgaagtatactagtatatatagtgtgatccatgtattgaaaaggttgttttgcttaatcgcgtcatgattgcacacgtgcttgtttctgcttaaacaacccatatatatagccggctctggcctttgtcaagtctgcaatccttatacatcgttggtaattcatgcatgagttctatgtaactgcaatttagataaattgtagctaatataatagtc

SEQ ID NO: 378 - protein, 124 aa, Zea mays
  G3794 polypeptide
MDDGGEPTKYRGVRRRPSGKFAAEIRDSSRQSVRMWLGTFDTAEEAARAYDRAAYAMRGQIAVLNFPAEARNYVRGGSSSSRQQQQGGGGGGGSGGGAGQQVIELECLDDQVLQEMLKGGDGKK

SEQ ID NO: 379 - DNA, 705 bp, Lycopersicon esculentum
  G3841
atggatcaacagttaccaccgacgaacttcccggtagattttccggtgtatcgccggaattcaagcttcagtcgtctaattccctgtttaactgaaaaatggggagatttaccactaaaagtcgacgattccgaagatatggtaatttacggtctattaaaagacgctctaagcgtcggatggtcgccgtttaatttcaccgccggcgaagtaaaatcggagccgagagaagaaattgaatcgtcgcctgaattttcaccttctccggcggagaccacggcagctccggcggctgaaacaccgaaaggaagacattatagaggcgttagacagcgtccgtgggggaaatttgcggcggagattagagatccggcgaagaacggagctagggtttggcttggaacgtacgaaacagctgaagaagctgcaattgcttatgataaagctgcttatagaatgagaggatcaaaagcacatttgaatttcccgcaccggatcggtttgaatgaaccggaaccggttcgagttacggcgaaaaggcgagcatcgccggaaccggcaagctcgtcgggaaacggttccatgaaacggagaagaaaagccgttcagaaatgtgatggagaaatggcgagtagatcaagtgtcatgcaagttggatgtcaaattgaacaattgacaggtgtccatcaactattggtcatttaa

SEQ ID NO: 380 - protein, 234 aa, Lycopersicon esculentum
  G3841 polypeptide
MDQQLPPTNFPVDFPVYRRNSSFSRLIPCLTEKWGDLPLKVDDSEDMVIYGLLKDALSVGWSPFNFTAGEVKSEPREEIESSPEFSPSPAETTAAPAAETPKGRHYRGVRQRPWGKFAAEIRDPAKNGARVWLGTYETAEEAAIAYDKAAYRMRGSKAHLNFPHRIGLNEPEPVRVTAKRRASPEPASSSGNGSMKRRRKAVQKCDGEMASRSSVMQVGCQIEQLTGVHQLLVI

SEQ ID NO: 381 - DNA, 704 bp, Lycopersicon esculentum
  G3843
atgtattcaaattgtgaactagaaaatgatttttcagtactcgaatcaattagaagatacttacttgaagattgggaagctccattaacgagctctgaaaactcaacatcctcagagttcagccggagcaacagcattgaatccaatatgtttagtaattcatttgattatacacctgaaatttttcaaaatgatattcttaatgaaggatttggatttggatttgaattcgagacttctgattttataatccctaaattagagtcacaaatgtcaatcgaatcacctgaaatgtggaatttaccggatttgtggctccattagagacggcggcggaggtgaaagttgaaacaccggttgagatgacaactacgacgacgaagccaaaggcaaagcattatagaggtgtgagagtgaggccatgggggaaattcgcggcggaaattagagatccggcgaaaaatggagcacgagtttggctcggtacatatgagacggcggaggatgcggcgttggcttacgacaaggcggcttttcgcatgcggggatcacgtgcattgctgaattttccgttgaggattaattccggtgaaccggatcctgttagagttggatcgaagagatcgtcaatgtcgccggagcattgttcatcggcgtcgtcgacgaagaggaggaagaaggttgctcgtggaacaaagcaataa

SEQ ID NO: 382 - protein, 234 aa, Lycopersicon esculentum
  G3843 polypeptide
MYSNCELENDFSVLESIRRYLLEDWEAPLTSSENSTSSEFSRSNSIESNMFSNSFDYTPEIFQNDILNEGFGFGFEFETSDFIIPKLESQMSIESPEMWNLPEFVAPLETAAEVKVETPVEMTTTTTKPKAKHYRGVRVRPWGKFAAEIRDPAKNGARVWLGTYETAEDAALAYDKAAFRMRGSRALLNFPLRINSGEPDPVRVGSKRSSMSPEHCSSASSTKRRKKVARGTKQ

SEQ ID NO: 383 - DNA, 1231 bp, Medicago truncatula
  G3844
ctctctaaaaaacatcacaaaacgaaaatttcattccttccacactctccaatctccatagcaaattacaacacaaaaactttaccaaaggccacaacatgtacggaaatagtaattttgattccgatcttgcccttttagactctattcgccgccacttgttaggagaatccgaatttatattcggtgctccaacaaatgtttcgggtaatacccgagttttctctcggagctccagtttcagcagcttatacccatgtttaagtgacaattggggtgaactaccactcaaagaagatgattctgaagatatggtactttacggcgtcctccgcgatgccgtaaatgttgggtgggtcccgtctctcgaagtcgggtcacccgaaagtgtctcatcggtttttccgttagaaatgacggtgaaaccggagccggatgttatgccggtggagaatgtcctcccggtagcttcaacagcggagcaagtggttcctgaggggccaaaagctgctccggtgaaaggaaaacactaccgcggtgtgagacaacggccgtgggggaaatttgcggcggagattcgtgatccggcgaagaacggagctagagtttggcttggaacatttgaaaccgctgaggatgcggctttggcttatgatagagctgcgtataggatgagagggtcaagagctttgttgaattttccacttcgggttaactccggtgaacccgacccggttagaatagcttcaaaacgttcttcgccggaacgctcttcgtcatcggaaagtaattctccggcgaagaggaagaaagtaatgacagctcagagtggattaaaaacaggacaagtgggaagtcaagtggcacaacaatgtacacgtggaggacagttattggtttcttaatatacggttctaccgtactaggaacaaaaaatgtttaggttaatgttgtgttgtgtttcttcaatgcaatttgtaattatccgaagacatgtgtgtactgtgtatagcactatgcaactattccttcttttgtgcctacacaattttggaaccaaggaaaaggatgaaaatgtagcaaaatggtgattcatgagggagacaaaaatgcgggagaaaaacaaaaattgaaaaaatgagaaatgaaataatgatgtttaaaggatagtgaatgaagtggggttatgcgatgtaactttgtgaatatagaaattcttatttgtttgatc

SEQ ID NO: 384 - protein, 268 aa, Medicago truncatula
  G3844 polypeptide
MYGNSNFDSDLALLDSIRRHLLGESEFIFGAPTNVSGNTRVFSRSSSFSSLYPCLSDNWGELPLKEDDSEDMVLYGVLRDAVNVGWVPSLEVGSPESVSSVFPLEMTVKPEPDVMPVENVLPVASTAEQVVPEGPKAAPVKGKHYRGVRQRPWGKFAAEIRDPAKNGARVWLGTFETAEDAALAYDRAAYRMRGSRALLNFPLRVNSGEPDPVRIASKRSSPERSSSSESNSPAKRKKVMTAQSGLKTGQVGSQVAQQCTRGGQLLVS

SEQ ID NO: 385 - DNA, 841 bp, Nicotiana tabacum
  G3845
acacaagagaactaaaacttaaaagcaaaatgaatcaaccaatttatacagagttgccgccggcgaattttccgggagaatttccggtgtaccgccggaattcaagcttcagtcgtctaatcccatgtttaactgaaacatggggcgacttaccactaaaagtcgacgattctgaagatatggtaatttatactctcttaaaagacgctcttaacgtcggatggtcgccgtttaatttcagcgccggcgaagtaaaatcggagcagagggaggaagaaattgtggtttctccggcggagacgacggccgcgccggcggctgagttacctaggggaaggcattacagaggtgttagacgacggccgtgggggaaatttgcggcggagattagggatccggcgaagaatggagctagggtttggcttggaacatacgaaacagatgaagaagctgcaattgcttatgataaagcggcttatagaatgcgcggttcaaaggctcatttaaattttccacatagaatcggtttaaatgaaccggaaccggttcgagttacggcgaaaagacgagcatcgcctgaaccggctagttcgtcggaaaatagttcacctaaacggagaagaaaggctgttgcaactgagaaatctgaagcagtagaagtggagagtaaatcaaatgttttgcaaactggatgtcaagttgaactattgacacgtcgacatcaattattagtcagttaagtatgaacttaggatattcaattgtggtactcttgagctccaaagttgtacagtttgattctctcatgttaattatatgacaggagggttaattgcaacgt

SEQ ID NO: 386 - protein, 236 aa, Nicotiana tabacum
  G3845 polypeptide
MNQPIYTELPPANFPGEFPVYRRNSSFSRLIPCLTETWGDLPLKVDDSEDMVIYTLLKDALNVGWSPFNFSAGEVKSEQREEEIVVSPAETTAAPAAELPRGRHYRGVRRRPWGKFAAEIRDPAKNGARVWLGTYETDEEAAIAYDKAAYRMRGSKAHLNFPHRIGLNEPEPVRVTAKRRASPEPASSSENSSPKRRRKAVATEKSEAVEVESKSNVLQTGCQVELLTRRHQLLVS

SEQ ID NO: 387 - DNA, 947 bp, Nicotiana tabacum
  G3846
acacaacacataaaaaatccaattgcttaaaactcataacaaacaaaatgtatcaaccaatttcgaccgagctacctccgacgagtttcagtagtctcatgccatgtttgacggatacatggggtgacttgccgttaaaagttgatgattccgaagatatggtaatttatgggctcttaagtgacgctttaactgccggatggacgccgtttaatttaacgtccaccgaaataaaagccgagccgagggaggagattgagccagctacgattcctgttccttcagtggctccacctgcggagactacgacggctcaagccgttgttcccaaggggaggcattataggggcgttaggcaaaggccgtgggggaaatttgcggcggaaataagggacccagctaaaaacggcgcacgggtttggctagggacttatgagacggctgaagaagccgcgctcgcttatgataaagcagcttacaggatgcgcggctccaaggctctattgaattttccgcataggatcggcttaaatgagcctgaaccggttagactaaccgctaagagacgatcacctgaaccggctagctcgtcaatatcatcggctttggaaaatggctcgccgaaacggaggagaaaagctgtagcggctaagaaggctgaattagaagtgcaaagccgatcaaatgctatgcaagttgggtgccagatggaacaatttccagttggcgagcagctattagtcagttaagatatgagctaagaactcaattgttaagtttggagtgaatagaaacagcaaactactccactttgctcatagttggaccaaggaggccatttgtattatgtctatggcgtgtaaagtgtcacctttcagtttaaaaacagtatttcttgtcctcactttggattgattaaatggataatactcgctttcgactgggtt

SEQ ID NO: 388 - protein, 233 aa, Nicotiana tabacum
  G3846 polypeptide
MYQPISTELPPTSFSSLMPCLTDTWGDLPLKVDDSEDMVIYGLLSDALTAGWTPFNLTSTEIKAEPREEIEPATIPVPSVAPPAETTTAQAVVPKGRHYRGVRQRPWGKFAAEIRDPAKNGARVWLGTYETAEEAALAYDKAAYRMRGSKALLNFPHRIGLNEPEPVRLTAKRRSPEPASSSISSALENGSPKRRRKAVAAKKAELEVQSRSNAMQVGCQMEQFPVGEQLLVS

SEQ ID NO: 389 - DNA, 957 bp, Oryza sativa (japonica cultivar-group)
  G3848
atgacggcgcgaagcatgttgcggaaccacccggaggcgtcggtgctcgacaccatccggcagcacctgctggaggagccgcgcggcggcggcggtggcgaggcggcggaggcgagcttcgggagcctggtggccgacatgtggagcgactcgctgccgttccgcgacgacgacgccgacgacatggtggtgttcggcgcgatgcgggacgcgttctcgtgcgggtggctgcccgacggcgtgttcgcggaggtgaagccggagcccctgctctcgccggactcgtcgtcgtacgacgggtcctcttgctgcttcggcttcgcggacgtgtcggagccggtgacgccgagcgacgcggcgtcgggggcggcagaagcggcggccgcggcggcggcggcgacggcggagcacgggaaggaggaggaggccgcggctgcggtggcgagggggaagcactacaggggggtgaggcagcggccgtggggcaagttcgcggcggagatccgggaccccgccaagaacggcgcgcgcgtgtggctcggcacgttcgacaccgccgaggacgccgccctggcgtacgaccgcgccgcctaccgcatgcgtggctcccgcgcgctcctcaacttcccgctccgcatcggctcggagatcgcagccgccgccgccgccgcagcggcagcggcagccggcgacaagcggccgtcgccggagccggcgacctcggagtcgtccttctcctcctcatcctcctgcaccaccaccaccacctcctcctcaacctcctcctccggctccccgaaacggagaaagagaggcgaggccgcggccgcgtccatgtccatgcccctggtgcccccgccttcccagctgaactggccggtgcaggcatggtaccccgccgccgcaccggtcgagcaggtggcgatcaccccgcgcgtggagcagctcgtcatctaa

SEQ ID NO: 390 - protein, 318 aa, Oryza sativa (japonica cultivar-group)
  G3848 polypeptide
MTARSMLRNHPEASVLDTIRQHLLEEPRGGGGGEAAEASFGSLVADMWSDSLPFRDDDADDMVVFGAMRDAFSCGWLPDGVFAEVKPEPLLSPDSSSYDGSSCCFGFADVSEPVTPSDAASGAAEAAAAAAAATAEHGKEEEAAAAVARGKHYRGVRQRPWGKFAAEIRDPAKNGARVWLGTFDTAEDAALAYDRAAYRMRGSRALLNFPLRIGSEIAAAAAAAAAAAAGDKRPSPEPATSESSFSSSSSCTTTTTSSSTSSSGSPKRRKRGEAAAASMSMPLVPPPSQLNWPVQAWYPAAAPVEQVAITPRVEQLVI

SEQ ID NO: 391 - DNA, 931 bp, Lycopersicon esculentum
  G3852
aaaaccttcaaatactcataatgtatcaacttcccacttctactgagttaactttttttccggcagaattcccggtgtattgccggagttcaagtttcagtagtctcatgccatgtttaaccgaatcatggggtgacttgccgttaaaagttaacgattccgaagatatggtaatttatgggtttctacaagacgcttttagtatcggatggacgccgtcaaatttaacgtccgaggaagtgaaactcgagccgagggaggagattgagccagctatgagtacttctgtttctccgccgacagtggctccagcggctttgcagcctaaaggaaggcattacaggggcgttagacaaaggccatggggaaaatttgcagcggaaataagagatccggctaaaaacggcgcacgggtttggcttggaacttacgagtcggctgaggaagccgcactcgcttatggtaaagccgcttttaggatgcgcggtactaaggctctattgaatttcccgcatagaattggtttaaatgagccggagccggttagagtgacggttaagagacgattatctgaatcggctagttcatcggtatcatcagcttcggaaagtggctcgcctaagaggaggagaaagggtgtagcggctaagcaagccgaattagaagttgagagccggggaccaaatgttatgaaagttggttgccaaatgttccagttggcgagcagctattggttagttaaaatatggagctaagaactcaatggctagggcttgtttggctttgaagtggacagaaaatagcaaatcattccactaggtgagaagtggaccaaagaggccatttggactatgtgtatctaacgtgtaaagtgcactttttagtttgtgcttttatgaaaaaaaacacacattttcatatagtggctttt

SEQ ID NO: 392 - protein, 244 aa, Lycopersicon esculentum
  G3852 polypeptide
MYQLPTSTELTFFPAEFPVYCRSSSFSSLMPCLTESWGDLPLKVNDSEDMVIYGFLQDAFSIGWTPSNLTSEEVKLEPREEIEPAMSTSVSPPTVAPAALQPKGRHYRGVRQRPWGKFAAEIRDPAKNGARVWLGTYESAEEAALAYGKAAFRMRGTKALLNFPHRIGLNEPEPVRVTVKRRLSESASSSVSSASESGSPKRRRKGVAAKQAELEVESRGPNVMKVGCQMFQLASSYWLVKIWS

SEQ ID NO: 393 - DNA, 885 bp, Zea mays
  G3856
atgctgcttaacccggcgtgcgaggcggcagcgccgatggacagcatccggcatcacctcctggacgagccggcggcggcggcgaccgcgagcgcggctccgcggccggtgtactgccgcagcacgagcttcggcagcctagtggcggaccaatggagcgagtcgctcccgttccgccccgacgacgccgacgacatggtcgtcttcggcgcgctccgcgacgccttttcccagggctggctccccgacggctccttcgccgccgtgaagcccgagcccctggcgttcccggactccccctacgagcgcggatcctatccctgccttggtggcttccttctcgcggaggggcctgagacgccgaccgaggcggcgacgacgcccgggagcgaggaggaggccgcggcggcggtgtccagggggaagcactaccgcggggtgaggcagcggccgtggggcaagttcgcggcggagatccgggacccggccaagaacggcgcgcgcgtgtggctgggcacgtacgacagcgccgaggacgccgccgtggcctacgaccgcgccgcgtaccgcatgcgcggctcccgcgcgctcctcaacttcccgctccgcatcggctccgagatcgccgcggcggccgccgccgtcgcggccactgcccctgccgcgggagacaagcgggcgtccccagagccgaccgcgagctccgactcctccccttcggcctcctctgcgacaccgaagcggaggaagagaggcgaggccgctgccgcgaccatggccatggcccttgtgccgcccccgccggcggcgcaggcgcccgtccagctgaccctcccggcccgtccgtggttcgccgccggccccgtccagcagctagtgagctaa

SEQ ID NO: 394 - protein, 294 aa, Zea mays
  G3856 polypeptide
MLLNPACEAAAPMDSIRHHLLDEPAAAATASAAPRPVYCRSTSFGSLVADQWSESLPFRPDDADDMVVFGALRDAFSQGWLPDGSFAAVKPEPLAFPDSPYERGSYPCLGGFLLAEGPETPTEAATTPGSEEEAAAAVSRGKHYRGVRQRPWGKFAAEIRDPAKNGARVWLGTYDSAEDAAVAYDRAAYRMRGSRALLNFPLRIGSEIAAAAAAVAATAPAAGDKRASPEPTASSDSSPSASSATPKRRKRGEAAAATMAMALVPPPPAAQAPVQLTLPARPWFAAGPVQQLVS

SEQ ID NO: 395 - DNA, 946 bp, Solanum tuberosum
  G3857
ccaaaaacctcataaatcactagaaaaaactaaaattcaaagcaaaatggatcaacagttgctaccgacgaacttcccggtgtatcgccggaattcaagcttcagtcgtctaatcccctgtttaactgaaacatggggagatttaccactaaaagtcgacgattccgaagatatggtaatttacggtctattaaaggacgctcttagcgtcggatggtcgccgtttagtttcaccaccggcgaagtaaaatcggaaccgagagaggaaattgagtcggcgcctgaatttgtaccttctccggcggagaagacggcagctccggtggctgaaacacccaagggaagacattatagaggcgttagacagcggccgtgggggaaatttgcggcggagattagagatccggcgaagaacggagctagggtttggcttggaacgtatgaaacagctgaagaagctgctattgcttatgataaagctgcttatagaatgagaggatcaaaagcacatttgaatttcccgcaccggatcggtttgaatgaaccggaaccggttcgagttacggcgaaaagacgagcatcgcctgaaccggtaagctcgtcggaaaacggttcaatgaaacggagaagaaaagccgttcggaaatgtgacggagaagtggagagtagatcaagtgttatgcaagttggatgtcaaatcgaacaattgacaggtgtccatcaactattggtcagttaaatagccggcaattttccgaacgcgaaatactttgtgcatattttccccgaacccttaaataaattcgaaatactctatgcatcggactatgatggtggagaagaatcgaaagtccaatgaaaaaaattatcgtgatagggtaatcccgaagttgtaaaaaagtttgattttcattaatattatctttgatctttgataattatttga

SEQ ID NO: 396 - protein, 230 aa, Solanum tuberosum
  G3857 polypeptide
MDQQLLPTNFPVYRRNSSFSRLIPCLTETWGDLPLKVDDSEDMVIYGLLKDALSVGWSPFSFTTGEVKSEPREEIESAPEFVPSPAEKTAAPVAETPKGRHYRGVRQRPWGKFAAEIRDPAKNGARVWLGTYETAEEAAIAYDKAAYRMRGSKAHLNFPHRIGLNEPEPVRVTAKRRASPEPVSSSENGSMKRRRKAVRKCDGEVESRSSVMQVGCQIEQLTGVHQLLVS

SEQ ID NO: 397 - DNA, 884 bp, Solanum tuberosum
  G3858
gatcaaaaactcataatgtatcaattacccatttctacagagttacctccgacttttttcccggcagaattcccggtgtattgccggagttcaagtttcagtagtctcatgccatgtttaaccgaatcatggggtgacttgccgttaaaagttaacgattccgaagatatggtaatttatgggcttctacaagacgccttcagtatcggatggacgccgtcaaatttaacgtcagtggaagtgaaacccgagccgagggaggagattgagccagctatgagtacttctgtttctccgccgacagagactgcggcggctccatcggctctgcaacctaaaggaaggcattacaggggcgttagacaaaggccatggggaaaatttgcagcggaaataagagatccagctaaaaacggcgcacgggtttggcttggaacttacgagtcggccgaggaagctgcgctcgcttatgatatagcagcttttaggatgcgcggtactaaggctctattgaatttcccgcatagaatcggtttaaatgagccggagccggttagagtgacggttaagagacgattacctgaaccggctagttcattggtatcatcagcctcggaaagtggctcgctgaagaggaggagaaaaggtgtagcggctaagcaagccgaattagaagttcagagccggggaccaaatgttattcaagttggttgccaaatggaacaatttccagttggcgagcagctattggttagttaaaatatggagctaagaactcaacggcaagggcttgtttcgctttgaagtggacagaaaattgcaattcattccacttggtgagaagtggaccaaagaggccatttggattatgtgtatctaacgtg

SEQ ID NO: 398 - protein, 247 aa, Solanum tuberosum
  G3858 polypeptide
MYQLPISTELPPTFFPAEFPVYCRSSSFSSLMPCLTESWGDLPLKVNDSEDMVIYGLLQDAFSIGWTPSNLTSVEVKPEPREEIEPAMSTSVSPPTETAAAPSALQPKGRHYRGVRQRPWGKFAAEIRDPAKNGARVWLGTYESAEEAALAYDIAAFRMRGTKALLNFPHRIGLNEPEPVRVTVKRRLPEPASSLVSSASESGSLKRRRKGVAAKQAELEVQSRGPNVIQVGCQMEQFPVGEQLLVS

SEQ ID NO: 399 - DNA, 1225 bp, Triticum aestivum
  G3864
cccacgcgtccgccaagagcgaactgagatcatcctaggaccaggcgcgaccacacaggacaagatgctgctgcttaatccggcgtccgaggcggcggcggcggcgctggacagcatccggcagcagctcctggaggagccaatggcgccggcgcggccggcgtactgccggagcgcgagcttcggcagcctggtggcggaccagtggagcgagtctctcccgttccggcccaacgacgccgacgacatggtcgtctacggtgccctccgcgacgccttctcctgcggctggctccccgacggctccttcgcggccgtcaagcccgagcccctgccctcccccgactcctacgacggctgctgcctcggcagcttcctcgcgtcgccgcccgggctggacgcgccgtgggcggaggaggccgaggtcgcagcgacggcgtcaagggggaagcacttcagaggcgtgaggcagcggccgtggggcaagttcgcggcggagatccgggacccagccaagaacggcgcgcgcgtgtggctcggcaccttcgacagcgccgaggacgccgctgtggcgtacgaccgcgccgcctaccgcatgcgcggctcccgcgcgctcctcaacttcccgctccgcatcggctcggagatcgccgcagccgcgggtcagaagcgtccgtctccccagccagcgagccccgactctcctcctccctcctccagcgcacccgggtcgtcgaagcggagaaagagaggcgaggccgcagcagagtccatgtccatggctctggtgccgcccccgccggtgcaggctccggtccagctgaccctcccagtccagccgtggctcgccaccggcgccgtccagcagctagtgagctgaagcggcgaaagcaacaagtgatcgttctcatgaccgatggccattagttcttccttcatggcttcatgtgttgagcccatggaggaacagagcatcaagatggcgtcaatggcgtaatgcgtcgctcgaagaaaccttgatcagttggaggcaattacgcgccacgccattgtgaaatttgtgtggctccgtgtgaaacttgtcgctagggttagtggcgttggcacagtagcaagtgggtgcagtggaatcccgaagctggtttgtaagaggtggtgagggtgcaggtgcaaaagttgcacagaccttctcctctccaatggagaatcttctttgttaaaaaaa

SEQ ID NO: 400 - protein, 271 aa, Triticum aestivum
  G3864 polypeptide
MLLLNPASEAAAAALDSIRQQLLEEPMAPARPAYCRSASFGSLVADQWSESLPFRPNDADDMVVYGALRDAFSCGWLPDGSFAAVKPEPLPSPDSYDGCCLGSFLASPPGLDAPWAEEAEVAATASRGKHFRGVRQRPWGKFAAEIRDPAKNGARVWLGTFDSAEDAAVAYDRAAYRMRGSRALLNFPLRIGSEIAAAAGQKRPSPQPASPDSPPPSSSAPGSSKRRKRGEAAAESMSMALVPPPPVQAPVQLTLPVQPWLATGAVQQLVS

SEQ ID NO: 401 - DNA, 1098 bp, Triticum aestivum
  G3865
cgctcggcgaatcccaagagcgaactcagatcatcctacgaccagacgcgaccacacaggataagatgctgctgcttaatccggcgtccgaggcggcggcgctggacagcatccggcagcagctcctggaggagccggcgcggccggcgtactgccggagcgcgagcttcggcagcctggtggcggaccagtggagcgagtcgctcccgttccgtcccaacgacgccgacgacatggtcgtctacggcgccctccgcgacgccttctcctgcggctggctccccgacggctccttcgcggccgtcaagcccgagcccctgccctcccccgacggctcctacgacggctcctgcctcggcagcttcctcgcgccgccggcgcccgggccggacgcgccgtgggcggaggaggaggccgaggtcgcggcggcggcgtcgagggggaagcacttcagaggcgtgaggcagcggccgtggggcaagttcgcggcggagatccgggacccggccaagaacggcgcgcgcgtgtggctcggcaccttcgacagcgccgaggacgccgccgtggcctacgaccgcgccgcctaccgcatgcgcggctcccgcgcgctcctcaacttcccgctccgcatcggctccgagatcgccgccgccgccgcagccgcgggccagaagcgtccgtctccccagccggcgagccccgactcttcatctccctcctgcagcgcgcccgggtcgtcgaagaggagaaagagaggcgaggccgcggcagcgtccatggccatggctctggtgccgcccccgccggcgcaggctccggtccagctgaccctcccagcccagccgtggctggccgccggcgccgtccagcagctggtgagctgaagcggcgaagcgaccagtgatcgttctcacttctcacgagcgattagttgcttgatgtgttgagcgacgtgaggaacagagcatcaagatgagatgaatggcgcgtaatgcgtcgctcgaagaaaccttcgatcagttggaagcgattacgcgccaaaaaaaaaaaaaaaaaaaaaaaaaaaaaaaaaaaaaaaaaaaaaaaaaaaaaaaaaaa

SEQ ID NO: 402 - protein, 272 aa, Triticum aestivum
  G3865 polypeptide
MLLLNPASEAAALDSIRQQLLEEPARPAYCRSASFGSLVADQWSESLPFRPNDADDMVVYGALRDAFSCGWLPDGSFAAVKPEPLPSPDGSYDGSCLGSFLAPPAPGPDAPWAEEEAEVAAAASRGKHFRGVRQRPWGKFAAEIRDPAKNGARVWLGTFDSAEDAAVAYDRAAYRMRGSRALLNFPLRIGSEIAAAAAAAGQKRPSPQPASPDSSSPSCSAPGSSKRRKRGEAAAASMAMALVPPPPAQAPVQLTLPAQPWLAAGAVQQLVS

SEQ ID NO: 403 - DNA, 710 bp, Oryza sativa
  misc_feature (20)..(20): n is a, c, g, or t
  misc_feature (31)..(31): n is a, c, g, or t
  misc_feature (51)..(51): n is a, c, g, or t
  misc_feature (64)..(64): n is a, c, g, or t
  misc_feature (98)..(98): n is a, c, g, or t
  misc_feature (115)..(115): n is a, c, g, or t
gacccagggtcccgctgacntcgccggcganccgcccgccgtcgttgcccnaggccagatccgncaagcccaggccggatctggccacttgccgccantccgacgacgacgaccntgcggtgttctaccttcgcggccggtcggcgcggctcaacttccccgaggagatctccttgctggcttcgccgtcagagggtggcggcgcaggcgagccccgcgagcccgacggcggcacgctgtccgcggcctcgatccggaagaaggccatcgaggtcggctcccatgtcgacgcgctccagaccggcatgatggtcgcgccgacccaccaccgcgagcagcagaagcaccaccaccacccgcacctgcaaccgcacggcgaggagcaacaccaccacgaggattggattagttctaagtatgaagacattcatacttaaaaatctcttgttgatctcttcctctcgcccctgtcttggttggattagttgccatattagagtaagcactaatccatccatacttcttgctcgatcttgatttcgcgtggttaagtaagtcgtattagcctttcaggttaaggaggttgttaaggtttttaagtaagaacctcctgtagcttacttactagtttgtgatgcttgctgtattttcttctagttcttggcttggtcttaaggagtttttgtttgattgtaaaaaaaaaaaaaaaa

SEQ ID NO: 404 - DNA, 536 bp, Oryza sativa
tcctccgacctcaatcgcatttcgccgaacaccttgcatgcgcccccgtccacgaccgcctccttggcgctatccgcttcgctgactagctatagctactagctgctactctctctctgtgtcttggggtggctaaggactacgaacaagatggatggaagaagggaggcaaaatcagctcggattactactcgtcgtcggaggtgtccggggtgggctcccgttgagtcggggttcttggtccgcggcgctggggcgcggggctgcggcggctggagcggcacgggcagccgcggcgccgacgacggagtgctgcgcgtcgacgcgggcgccgacctcggcggccttcttgcggatggcggcggcggtgagctccctgtggtcctcggcaccaccgccgctgccgccaccaccacccgcgccgtcgagctggtcggggaagttgaggcgcgcggagcgccgctctagaggatccaagcttacgtacgcgtgcatgcgacgtcatagctcttctatagtgtcacctaatcatcatg

SEQ ID NO: 405 - DNA, 418 bp, Oryza sativa
aaagatgcattgaaaaggcatgggttcagctagagaatcttggaccagataagggcttggagaaatcagaacttcagaactctgatattgacgcttcatataacatggatggaggtgtgggtctgtcgtgcccaacatgaataggcatcaattttatgatgcaattgcacgatttggtgctttataatttggatgtatgtttatagaagccaagagtctgattgtgggtgtgataatcttgaatattggcgcccatagatgctcataaaaatcctatatattaaaaggataaggcatgcgccagtgtgtctctagttttgtaacattgaagcattttaagcttcttgtattccgcttacttttttcataataaatcgtactggtgtggattacttttttcaaaaaaaaaaaaaaaaaa

SEQ ID NO: 406 - DNA, 832 bp, Oryza sativa
  misc_feature (33)..(33): n is a, c, g, or t
  misc_feature (55)..(55): n is a, c, g, or t
  misc_feature (77)..(77): n is a, c, g, or t
  misc_feature (99)..(99): n is a, c, g, or t
ttgaagtcccagatatcccgatggatggacacntgttgacaaaagtttcggaaancgccttgccaagcatgctgggnttcaattccagttccaccccgnaatggcttcagagttcccgccgagcacaggaaaatctgttgtcccactttagtgctgtcaacccgagtagctctatcccgtgtcactgcaggcattatccaactcggtggtatcacttttactggtagcaccgagcacctgcagaagaatggagatttcaatttgctcctctctttcactgtcgagggcgacgtctcaaccaaatccattggttttgaaccggatacgcagatgagcaccacgccaatggtgttgcgcagcggcatgtatcttttcttcgtatcggcgatgattctcatgttgagctacaaagttgggctgtgtatctacagcaggtaagttatagtagtttttgttgccccaggctgtttattaaattgaaggagtcatacagagtccactcgacgtagagggaactgcctgcgatttggacagtttggttctttacattgttatagttggtataccgttctgacagttgaaagatacatagcaataaactctggaattggagaaactagagttacacgaatttggtgctgaaacttttgttggtggcatgtactgtataatttactctatttatttatttcacccaattctgggaggctgtaagcgttccccgatcgatgtaagctgatctgaaacctgaatacgcgctcttcatttttcatacccaaagggccgagaggcacagtttgcagttactgttgatcaaaaaaaaaaaaaaaaa

SEQ ID NO: 407 - DNA, 526 bp, Oryza sativa
cgaggctgatgaggtacagggagaatgcggaagaatccggcggttcgagaagacgatccggtacgcgtcgcgcaaggcctacgccgagacgcgcccccggatcaagggccctgttgccaagcgcccgaccacgacgccgacgacgccgacgccgacgccgacgaccccgccagccgtcccatcctcctacatgctcgacttcggctacggcgtcgtcccgtccttctgatcgccgcccgccgccggccaccgccgccgcagccagtcgcttgtaatcttgtatcaaatcgatcgatcagatgtgtaggggcgtagtaatcaccatgtagtactcattttgagctagctcacgctagttttgtacactactactgctactaattacgtgcttactacttagtggtaattatttttttgatcagcaagatctactatattgtattagctccccccaacgaataaatcacaactatatggtattattcatcagctaggaattgttgatggaaacaaaaaaaaaaaaaaa

SEQ ID NO: 408 - DNA, 1361 bp, Oryza sativa
attgacgtcttcgcacaggcacccagccatgctgaagttggagccggagttccccggcctgccgcagcggtgcgactcgtgccggtcggcgccgtgcgcgttctattgcctcgccgattcggcggcgctctgtgccacgtgcgacgctgacgtgcactccgtcaacccgctggcacgccgccaccgccgcgtaccaatgggcgtggtggctgcccccggcgccgggggagccttcgtcgtccgccctgcaggcggtgtcaactcctcctggccaatccgagagggcaggaggtgcgactacgacgatgacgacgccgacgccgctggggaggaagacgaagaggcgacgtcgtggcttctgttcgacccgctcaaggactcctcggatcaggggctgccgccgttcggcgacgcgctggtggccgacttcctcaacctcggcgggggcgccggggagaaggaggacgcgtcgtcgagcaaggactgcagcagcagccacgggaagagcagcgagggcagccacgagttcgccgtgcccggcgagcccgtaccggagcgccagggcttcggggcggtgagtatggacattaccgactacgacgcctccaatttcaggcgcgggtacagctttggcgcatcgctcggccacagcgtttcgatgtcatcgctggagaacatgagcacggtcccagactgcggtgtgccagacatcaccacctcctacttgaggtcatccaagagcaccatcgacctcttcacggcagcagctggctcccctgtggcggcgcacagcataatgtcgccaccgcagttcatgggcgccattgacagggaggccagggtgcaccggtacagggagaagaggaagacgaggcggttcgagaagaccatcaggtacgcgtcgcggaaggcgtatgccgagacccggccgaggatcaagggacgcttcgccaagcgcagcgacaccgaccttgaggtcgaccagtacttctccaccaccgccgactccagctgcggcgtcgtgcccacgttctagcgagcagcttggccgcacgcctggaagacaatcaaagaagctcaggaatgaatatattctcccactgtatagtacatcttggttgcttagctatatatatatatatatatatatatatatatgtataattcgccgaatcgcctctaaatttgtgggaggtatgaggcttcagctgtaggtatatatagatgctagaaagatgctccttgtaaaattgtgcaggagtaaatgtaatcatgtagtcatccctccttctccaatcctttacaatacatttctgtttttttattcagcttaaaaactacgttttgttttttctcccgat

SEQ ID NO: 409 - DNA, 1557 bp, Oryza sativa
caaaattccacaagagccatgcgaggtagaggaacaggagaagacgcatacacacacgacacatagagagagaggacaaacacaatagcttggatcgatagacttgtccatgtggtgcaagctaaagctactactaccacaagcaaggctacttcgttcatgaattataattttggtggcaacgtgttcgaccaggaggttggagttggaggcgaaggaggaggaggaggagaggggagcggctgcccatgggcgcggccgtgcgacgggtgccgcgcggcgccgagcgtggtgtactgccgcgcggacgcggcgtacctgtgcgcgtcgtgcgacgcgcgggtgcacgcggccaaccgcgtggcgtcccgccacgagcgcgtgcgggtgtgcgaggcctgcgagcgcgccccggccgcgctcgcgtgccgcgccgacgccgccgcgctgtgcgtggcgtgcgacgtgcaggtgcactccgcgaacccgctcccggccatcaccatcccggccacctccgtcctcgctgaggcggtggtggccaccgccaccgtcctcggcgacaaggacgaggaggtggactcttggcttctcctctccaaagattccgacaacaacaacaacaataacaacaacaacgacaacgacaataacgacaacaacaacagcaacagcagcaacaacggcatgtattttggtgaagtcgatgagtactttgatcttgtcgggtacaattcgtactacgacaaccgcatcgaaaacaaccaagatcggcagtatgggatgcatgaacagcaagagcagcagcagcagcagcaggagatgcaaaaggagtttgcagagaaggaagggagcgagtgtgtggtaccttcacagatcacaatgctgagtgagcagcagcatagtggttatggagttgtgggagcagaccaggccgcctccatgaccgccggcgtcagtgcttacacagattccatcagcaacagcatatctttctcatcaatggaggcgggtatagtaccagacagcacggtgatagatatgccaaattccagaatcctgacacctgctggagcaatcaatctcttctcaggtccctcgcttcagatgtcccttcacttcagctccatggacagggaggccagggtgctcaggtacagggagaagaagaaggccaggaagtttgagaagacaatacgttatgaaacaagaaaggcgtatgcagaggcacgaccccggatcaagggccgtttcgccaagagatcagatgtgcagatcgaagtggaccagatgttctccactgcagctctatctgacggtagctatggtactgttccatggttctgatgggactcatgagacgctatcttataggcatatatatggggacttactgagtagcaataacatcgatccagtgggagtagttctagacaatctgtgttatgaataatagtgtgttgtttgcgacttaaaattgatcaagtaccttagctttttaaagttttgctttgtaatttccggatagcagatatatattgttggtacttgctcagt

SEQ ID NO: 410 - DNA, 386 bp, Oryza sativa
  misc_feature (18)..(18): n is a, c, g, or t
  misc_feature (30)..(30): n is a, c, g, or t
  misc_feature (76)..(76): n is a, c, g, or t
  misc_feature (154)..(154): n is a, c, g, or t
  misc_feature (242)..(242): n is a, c, g, or t
cctaaaaccgtaaccttntgccccgaccgnccctaaaaacccgtaccccaacccaaagaaagatttgctccccacncatcatgaacaatggcaaagacccctagcttaagtcatggtgcatggcattgttgttgctgatgttcttggttcttcntgatgctgttgatgcgtcatgtattagtgccgtaataataataatactattattagcattaaaccagtgggttgtactgtagttttancggttggtttgggtataacgtgaggagatctggtggtctaccactggtaggccgggaaaggaggaggtatatgggtatatggaagaactgaaactagtaatatgtttgtttccgttcaatttcaaaaaaaaaaaaaaaaaaaaa

SEQ ID NO: 411 - DNA, 630 bp, Oryza sativa
tcggaacgaaggagatgaagctcgtcaaccgggtgacgcaacgagtacgtgccgacgtacgaggacaaggacggcgactgaatgctcgtcggagacgtccctggaaaatgtttgtggagacctgccaacgtcttcgtctcatgaaaagctctgaacagtcaatttagcaccagatctgctcgatgagtcgcaaatctctgctcctgtctttgagaagcatgagaggaagccatctttgcttgctgaggtttttccatgtctgtgagagaaatgtgtacagtcatcgacttcgacttttggttccatcgtgctattgagtttcagaaaagaaatggtttttagcttgtagctttgttaccagtcagtagtctctccatatagatgagcgaagcggtgatgctttaaaatacacccatagattgttttctcgataaataaaattggtctcactcactgagcccctgttcttcgacatgctttctaccactagtttgttcgataatgtgatgtgcatgtgaggcctgtgatggtgcaagaatcatataacttgtcatgttaataactattttgttgtaagattatgtttactgcatggtgttataagctatttaaaaaaaaaaaaaaaaaaaa

SEQ ID NO: 412 - DNA, 580 bp, Oryza sativa
  misc_feature (45)..(45): n is a, c, g, or t
  misc_feature (81)..(81): n is a, c, g, or t
  misc_feature (90)..(90): n is a, c, g, or t
  misc_feature (196)..(196): n is a, c, g, or t
  misc_feature (274)..(275): n is a, c, g, or t
  misc_feature (281)..(281): n is a, c, g, or t
tggcgcctgtgagaagtgttgttctacgttgggctttcacccaancctggccaaaggatgggctttattctggagagccgnccaaagganggctgcaataatggtgcgtgacttgatgaagaccataggatggaggactggagtgcttgtgttggccgatgtttccactggggagaatcgttgtcccacaactctntgtcgcagactcaggatcatgaaaggttcagatgcaattggacttgctcacaagggcagttgataagtccctaatatnnccgcantactagaatggtttctggccccacaagtcaaaagccaagatggagtatcaaatgactgtagggaattttgctgaaaaccaagaagtgctgaacacgttttaagatggagtgctgcgccttatgggctgtactacactggtttgctattggtgaaagttaaaaaaaaaaggtgtcttgttatgttagcttcgccaaatctccctagggacataaactctatttggattgtgcccaagtcgtttgtacgtgtgttaatgctattcgtgtaaatggtttggtaaaaaaaaaaaaaaaaaaaa

SEQ ID NO: 413 - DNA, 630 bp, Oryza sativa
  misc_feature (68)..(68): n is a, c, g, or t
  misc_feature (88)..(88): n is a, c, g, or t
  misc_feature (115)..(115): n is a, c, g, or t
  misc_feature (184)..(184): n is a, c, g, or t
  misc_feature (608)..(608): n is a, c, g, or t
tccaggacaagttcttctcccacttcacccatcccggaagttcgcccgacgacgagaggaagctggtngacccggtgaacgggacggngtacgtgccgacgtacgaggacaaggncggcgactggatgctcgtcggcgacgtcccctggaagatgtttgtggaaacttgccagcgcttcgtctnatgaaaagctcagaggctgtcaacttagcaccaagagccgctcaatgaggcattcccggtgcccatgaccgtgtggttggattgaaagaaagtggaagctttgccccgccgatgttcgcccacgtgtgatatgaacatgtacagttgtctcctactacttttggttccttgatgatgctgagttgagaaaaaggttgtagtttcgttactcgtctgtagtctctccatatatagataatgaagcactgaagcttgaaatatacacctacagtttgtctctttatgaataagaccatatacgcaaaaaaaccgatgttctttgctgcggctcgcgtgtcgtcaggctatatgcagttttttgtcgcaccataggcgatggacatctctggccttatactttcgtaaaaatcttatcatgttaagngaaaaaaaaaaaaaaaaaaaaa

SEQ ID NO: 414 - DNA, 1068 bp, Oryza sativa
cggcacgagccaccacctcctaatcaccacaaaggcttaaaaatctccagtctccatagagagaaagagagagaagagaaggcagcttgatttggggcgaggagacgcgatagccgcgataggctaagcagctggcagcggcggctgctgcgatggccggcgccgacgtggacgtcgggacggagctccggctggggctgcccggaggtggcggcggcgccgccgaggcggcggccaaggccgcgaagaggggcttcgaggagaccattgacctgaagctgaagctgcccaccgccggcatggaggaggccgccgccggcaaggcggaggcgccggccgccgagaaggccaagaggccggcggaggccgccgccgccgacgccgagaagccacctgctcccaaggcgcaggcagtgggttggccaccagttcggtcgttccgcaggaacatcatgaccgtccagtcagtgaagagcaagaaggaagaggaagctgacaagcagcagcagcagcccgctgccaatgccagcggcagcaacagctctgccttcgtgaaggtcagcatggacggggcaccctacctgcgcaaggtggacctgaagatgtacaacagctacaaggacctctcccttgctctgcagaagatgttcggcaccttcaccgcaactgggaacaatatgaatgaggtgaatggctctgatgctggtacaacttatgaagacaaggatggtgactggatgcttgttggagatgtcccgtggcagatgtttgtcgagtcatgcaaacgcttgaggatcatgaagggttccgaagccattggtcttgcaccaagagcaaaggacaagtacaagaacaagagctgaaaatgttgcagtattaagatgctgagcatggtgccataaaaatggtgttcttgcagtgtgttatggtttccttagaaatataaggttttacttgtttagctggattaaaggaaggaagagttgtcatgtttaatttgtttatggaccagaagcaataatccatttgtgtgtagctggattggtgttaaaaaaaaaaaaaaaaaaa

SEQ ID NO: 415 - DNA, 568 bp, Oryza sativa
ccgcctccctcccgatcagccccccctccggggaagaacaccccctgcaccatgtatagatccgtacacattttcatccataatacataatccgaattgttgtgtttgatttgatttgggtcagtttgaattttgctcgaatttgaaattatgaaattcgcctacctgggctctccggtgtcagttcctgttcgagctgagcaagcctgatcctgctggactccagctgctggatgctcagcagcgaaaggttggtgctgcaggtggtggtgatcctgtctcctgctccctgtcgccaactcctccatggctgctgctgcttgctgctgatggtggtgttgatgatcaggtgacctcgccatcttggttcccacagctgctggggacagcactaaactaatctctccctgccaaaatcaatcaatcaatcatcacatccacaacttaaaccatctttgatttcatatatactacacacgagtgctacattgaaaagacaatgacataaccatgtgagattcagatgaaagtaagtaaaattaattaaataaaaaaaaaaaaaaaaaaa

SEQ ID NO: 416 - DNA, 552 bp, Oryza sativa
ttcgcgttccggtcggcaccatgcccgaccatctcccgccaggagaccctccagaacatgtaccagatcctgacgctgcccaggcggcgccgggctcctcgcgctcggcgactactgccagccctccgcgctgctcagctcgctctgggcggcgcgcccgcgcgagccggcgtaaagcgagctgagctcccgccggcaacggccagcctgatcgatcaccggaggaggagcaagatgtcgtcgctgagctcccggggaagacgacatggagctcaagtggctcagtttgagttctctgcattttcatttgcaaggacaggaaagaaattaaacggacgtgttcacttcatcataggatagcagcagcacagtagctaggaggaggaggaggagaatttgaatttgaatttaaaagacgtgtaaatatttactacagtaattaacttgcttgggtagttatttgcgtcgctcaacttgtaattgctgccatttcccatggataaaaaaaatgtcagggatgctcaaaaaaaaaaaaacaaaaaaaaaaaaaaa

SEQ ID NO: 417 - DNA, 543 bp, Oryza sativa
tgatactctttattcagaagtagacaacacgggtacccacaactgcggttgtacccaagttatcagaaggcacagcaggatgaagcatcagatcaacctgaacatgcatgagttgttggtcaagtatggttggccgtcgaaatacacgggaaaacgttgtcaacggcgggtcattctcttatatcaaggggtgacaactggttacagagaagtgggtgcattgctgtgctcctgaagccacaaaatgtaaatgctggaaactagaatatagagattcaagtccctggaaactagaatatagagattctcttatatcagcgtcgaggaagatcaagattcattctgctgaagcaaagctccttgtcccgacgttcgttcattgatcctttggttatggactcttcaagtttgattttcggttaataccattttggtaaaccttttacttttgtagttcaaattaaaatatccatatgtgaaattagatccaagagaaaatggcatgaaacataatttgatcgtctaaaaaaaaaaaaaaaaaaa

SEQ ID NO: 418 - DNA, 1359 bp, Oryza sativa
cgcccgggcaggtcagtagttgaccctcagacactggtcccacaaaagggagcacaactgaattgggtaactataaggactggtaacgttgagaattggggggagtcgactatggctgatacaagtccaaggactgatacatcaacagatccagacactgatgagaggaatcagatgtttgaacaaggacagttagctgctcccactgcttctgattctagtgacaggtcaaaggacaaactagatcataagacacttcgccgccttgcccaaaatcgtgaagctgctaggaaaagccgtttaagaaagaaggcatatatccaaaaccttgagagtagcagattgaaacttactcagatagagcaagagcttcagcgggctcgtcaacagggcatttttatatcaacatcgagtgatcagtcccactcagcgagtggaaatggagctttggcatttgacatggagtatgcacggtggttggaggagcataacaaacatataaatgagttgagggctgcagttaatgcacacgctggtgataatgatctcaaaagtacagttgatagtattatggcacactacaatgaaattttcaagctcaagggtgtggcagccaaagcagacgtttttcatgtgctgtcgggaatgtggaaaacccctgctgagaggtgcttcatgtggctaggtggcttccgatcatctgagcttcttaagttactggcagggcaattagagcctcttacagagcagcagcttgctggcatagccaacctgcaacaatcctcccaacaggctgaagatgctctttctcaagggatggaagcactacaacagtcgcttgcagagaccctggcatcaggatctctcggccctgcaggatcttctggtaatgttgcaaactacatgggacaaatggcaatggctatggggaaacttggtaccctagaaaacttcctacggcaggctgataatctgcggcttcagactcttcagcaaatgcagcgcatattaaccactcgccagtcagcacgagctctacttgcaataagtgactacttctcccggcttcgtgccctgagttctctttggctcgcccgtccaagggaataaaataaattgaattgattcgtaagtaggatattgttaggtaatgtatctctagtgttatatcagataggaattgaggtattccctacttcctagattcttcacaatgttcatgtattggtgacagactcggatcactatctttccatgtatgtcttcaagtgaatggtcaatgcatattgtagtctgtatatgacatcatatgatgagttgttgggcaaaattgtacatttttgagaaaaatgggggatg

SEQ ID NO: 419 - DNA, 1548 bp, Oryza sativa
actcactatagggctcgagcggccgcccgggcaggtgtcgctcgtcgacccctctccgccgccgaggctcgctgtcccaagctaatccgtccgcttcgttgaggattccattgaatgcttggctgtggtggagtgctacactgctagtagcagcttgcatctcagcaatttgggtgaaccccccacattcttgaggcagtaacaattggatctacatcttgccactacaaaaggatcaacgatctgtactagccttcatttgtgggttcctcattgggaattgggattctttacaatggcagatatgagccctaggacagatacatcaacagatgataccgatgataaccacatgcttgaaccaggtcagcttgctcttgctgctgcttctgactctgacagatccaaggacaaacatgaagatcaaaagacattgcgtcggctcgcccaaaatcgcgaggctgcaaggaagagtcgtttgaggaaaaaggcatatgttcaacaattggagaatagcaggctaaagcttacacaactagaacaagaattgcaacgagctcgtcagcagggcatttttatatccagctcagtggaccagactcattccatgagtggaaatggggcattggcttttgatatggagtatgcacgttggttggaagaacacaataggcaaattaatgagctaaggtctgcagtcaatgctcatgcaggtgataatgagctccgtggtgttgttgacaagatcatgtcacactatgaggagattttcaagcagaaaggaaatgcggccaaagcagatgtctttcatgtgttatcaggcatgtggaagacaccagctgagaggtgtttcttgtggctaggaggattccgaccatccgagcttttaaagcttctttcgacacagcttgaacctctcactgagcagcagctgtcagggatagccaaccttcagcagtcttcacaacaagctgaagatgctctttcacaaggaatggaggcccttcagcagtccttggcagaaacattggctgggtctcttggttcttctggatcaacgggaaacgtggcaaactacatgggccaaatggcaatggccatggggaagcttgggacccttgagaatttccttcgccaggctgacaacctgcggcagcagactcttcaacagatgcaaaggatactgaccactaggcagtctgcccgtgcgcttcttgtgataagcgattactcttcgcggcttcgtgcccttagttccctctggcttgctcggccgaaagaatagcaagcgcaagtaacttgactgcaaccacatttttcgggtttgggaggtgatggtgatcttacctggaagagttgacaatcctgcaaaggacttgattcggagatatttgcacatactataatccaaaagagatccttgtgttcaggtagcttagtcttatggttaagtgcattaggccctggcccatgttgtactgttagccgctgtaaaatactgttccattattacttatgtatctgtaatatcctaattttcagagaatg

SEQ ID NO: 420 - DNA, 2155 bp, Oryza sativa
tcgagcggccgcccgggcaggaaaccgctcctcctcctcctcccaaatccaccacggcgacgccgccgccgcagagcccctagctcccggaggtccctcgcccccgccagctccgacggcctcacggaaggaggagtaacgtgggcgttgattggatttttttgttttccccccaccttgagtgagtctgtgccgtttccccggcggcgagggagggcagagggctgatcatggtcgtgcgccgccggtgccttgccgagatttcccccaaccgccaccgacgatcgttcacttggcacaaaggggagtagcactgtccaagctgttgtggtccgtcagggagattggccaacctgtggggtttcagatcgacataagtacgtcagtatttcagccatcgatcaatctggcggttatagggctgtgcttgcaacctttctggcagaaaggagagagcaaagtgatttgctgtctcctgttgattgtggcctgttgaggcccagtaatggcagatgctagttcaaggactgacacatcgattgttgtagacaacgacgacaaaaaccaccagttagaaaacggacatagtggtgcagtcatggcttctaactcttcagatagatctgacagatctgacaaacttatggaccaaaagacaattcggcggcttgctcaaaatcgtgaggcagcaagaaaaagtcggctgaggaaaaaggcatatgtgcaacaactagagagcagtaagctgaagcttgcacagctagagcaggaacttcagaaagctcgtcagcagggaatcttcatctctagctctggagaccagacccatgccatgagtggaaatggggcattgacttttgacttagaatacactagatggctcgaggagcaaaataagcagataaatgagttgaggacagcagtgaatgctcatgcaagtgacagtgaccttcgtcttattgttgatggcataatggcgcattatgacgaggtattcaaggttaagggtgtagctgcaaaggccgatgtgtttcatatactttcaggcatgtggaagacacccgcagaaagatgcttcctgtggcttggtggtttccgtccatctgagcttctaaagctcctagcaaatcacctcgaacctttaaccgagcagcagttgctgggattaaacaacctccaggaatcttctcagcaggcggaggatgcactttcacaaggtatggaagcactgcagcaatctctggcagatactttggctggatctctcggttcatcagggtcttctgggaatgtggcgaactacatgggtcagatggcaatggccatgggtaaactaggaacgctcgagaatttcctttgccaggcggacaacctgcgacagcagacattgcatcaaatgcaacgaattctgacgatccggcaagcctcgcgtgctcttcttgccatacacgattacttttcacgcttgcgtgctttgagttcgctgtggcttgctaggccacgggagtaacaaaatggtcatgtgtgcctgtgacgaggttagacgctcattttgatggactgcagataattgggtttttccctgtacaattgtgtttggcagctgtggactaaagttaaaaactgtacctaaagtggtgtatgcaaataggtgaagcctctaagtaattataacgattgcattattgtgttagcaataaaagttgggtaattcaggatgtgtcctgagttgttttgttgtagtagaagaactgcatgtagtggctggaaatgcagtgttgaatgtaactaaagctctgctgctcacgttgcataatgttgtgtagtaatagttagctagtgatgcccattttacctgcactcctctgggaagctgaaactgcaacctgaagcaaccacggtgcagaagaccgcatgcatggtaaatgattaaaaggatatatatgggctcaacatcgctgccaaatcctgagataatgaacaggcatgctaaactgctacttccacatgaaacctcccagttgacatgaagaatgagctgttcagttttatggtttctgtgttgcactgtacataattcctgtacgggtctgaatttatcctgaaatcatgctaaactgcagaagcatatgaaatctccagaccggttgacatg

SEQ ID NO: 421 - DNA, 1654 bp, Oryza sativa
tcgagcggccgcccgggcaggtcgcctcgcctctctctcttccttctgaccaacccgacctcggcgcctccccccatttctctctctctctcttcgcgttgccgtctcgaccccgcctccaccgccgaagccgcccgaggcggcggccgccggcagctgggctcctccgaatccgaacacggcggggtctctcccctcgctccccacggcggttggcacctgctggctctcgatccaacgtgtacagctaatttgatctgttggcgccttagctagaaaggtggcgactctggcatctcagtgatcatagggcatttgaaggtggcctgcatccctgttacaagtaagggacaacaaagcaatttgttgtctctttatttggagctgggaagaacccggcatggcagatgctagttcgaggactgacacatcaacagtcctggataccgacgataagaatcagatggtagacgggcaaagtggagctattgtgccttctaattcatctgatcggtctgacagatctgacaagcccatggaccaaaaggtgttacgccggcttgctcaaaatcgtgaggctgcaagaaaaagtcggctgagaaaaaaggcatatgtacaacaattagagagcagtaagctgaaacttgcaagcttggagcaagagatcaataaagctcgccaacaaggaatttacatttcgagctcaggagaccaaactcatgctatgagtggaaatggagctatgacttttgatttagaatatgcccgttggttggaggaacaaaacaagcagataaatgagctgaggactgcagtaaatgctcatgcaagtgacagcgacctccgtctcattgtagatgggataatggcgcattacgatgagatattcaggctgaagggtgttgccgcaaaggctgatgtgtttcatatactttcaggcatgtggaaaacacctgctgaaaggtgcttcttgtggcttgggggttttcgttcctctgagcttctaaagcttcttgtgaatcagctcgagccattaactgagcagcagttgttgggactatcgaacctccaacagtcctctcagcaggctgaagatgctctatcacagggaatggaagcgttgcaacaatccttggcaggtacgttggccgggtcccttggtccatcaggatcttcagggaacgtggcaaactacatgggtcaaatggctatggccatgggcaaacttgggacccttgagaatttcctccgtcaggctgacagtttgcggcagcagactttacatcaaatgcagcgaattctgacaatccgacaagctgcccgtgctctacttgcaatacatgattacttctcacgtttgcgtgccctgagttctctctggcttgctaggccacgggagtaacaacacatagggtgcatcaccgttaatgcttcatgaactgatctgggaggaacggcggagcgggactgattgcggatgcatttgcagaagattggtggctcagttccctcggcacaagttgtattgacaccttttggtttcatgttgtacctgatgttgtacaagtagggtaaagcttgtaacttgtaagttatggtgaatttatgattggcagattgtacaattgtattagcaataaaataaaaggtaggt

SEQ ID NO: 422 - DNA, 1696 bp, Oryza sativa
gcagccgcttcccaatcctctcctcttctccaagcggcaattcgcgcgaggttttctccgatcaaaccctcgaatccccccctcgcgaatccatcggagggtagccccgcgatccgcgtcggcgagagcggattccgattccgcgatggagcgggtgttctccgtggaggagatctccgacccattctgggtcccgcctccgccgccgcagtcggcggcggcggcccagcagcagggcggcggcggcgtggcttcgggaggtggtggtggtgtagcggggggcggcggcggcggaaacgcgatgaaccggtgcccgtcggagtggtacttccagaagtttctggaggaggcggtgctcgatagccccgtcccgaaccctagcccgagggccgaagcgggagggatcaggggcgcaggaggggtggtgccggtcgatgttaagcagccgcagctctcggcggcggcggcggcggcggcgacgacgagcgcggtggtggaccccgtggagtacaacgcgatgctgaagcagaagctggagaaggacctcgccgcggtcgccatgtggagggcctctggcacagttccacctgagcgtcctggagctggttcatccttgctgaatgcagatgtttcacacataggcgctcctatttccatcggaggcaatgctactccagttcaaaacatgctaagtggcccaagtgggggatcgggctcacagttggtacagaatgttgatgtccttgtaaagcaggccaccagctcttcatcaagggagcagtcagatgatgatgacatggagggagaagctgagaccactggaactgcaagacctgctgatcaaagattacaacgaaggaagcaatccaatcgggagtcagccaggcgctcaagaagcagaaaggcagctcacttgaatgagctggaggcacaggtatcgcaattaagagtcgagaactcctcgctgttaaggcgtcttgctgatgttaaccagaagtacaatgatgctgctgttgacaatagagtgctaaaagcagatgttgagaccttgagagcaaaggtgaagatggcagaggactcggtgaagcgggtgacaggcatgaacgcgttgtttcccgccgcttctgatatgtcatccctcagcatgccattcaacagctccccatctgaagcaacgtcagacgctgctgttcccatccaagatgacccgaacaattacttcgctactaacaacgacatcggaggtaacaacaactacatgcccgacataccttcttcggctcaggaggacgaggacttcgtcaatggcgctctggctgccggcaagattggccggacagcctcgctgcagcgggtggcgagcctggagcatctccagaagaggatgtgcggtgggccggcttcgtctgggtcgacgtcctgagaccgaaacccagagctgcttcggttctgaaagacactgcgagcaggaaatgatgattggacaggcgtagacattgctaatgctgtgaggttgatgattgttggtcgtcgtcgtcgtcattgtgcattctttgtaagggacacctcttagtaccctcttcttctaagggacttagtaccccttgtggatctcatcgtcctctcgtgccgctcgtgccgctcgtgccgaattcggcacgagctcgtgccgaattccagctgagcgccgtcgcta

SEQ ID NO: 423 - DNA, 1768 bp, Oryza sativa
aaaaaacccatgggttgcgtagccgtagctttcccaccatttccttctctccgaagcctcctcctctccgcttcctcccgcgaaaccaaattccaaagcatttgatcgaatttctcccaaacttttccagcgttttcaatttcgccccgatttcggttcgaaaacccctcgcgaattcatttcaaactcgtccgagagcgcaatggagcacgtgttcgccgtcgacgagatccccgacccgctgtgggctccgccgccgccggtgcagccggcggcggccgccggagtagatgacgtcggcgcggtgagcggcggcgggttgctggagcggtgcccgtcggggtggaacctcgagaggtttctggaggagctcgacggcgtccctgcaccggcggcgagcccggacggcgcggcgatttaccctagcccgatgccggcggcggcggcggaggcggcggcgcgctggagtaggggctacggcgatcgtgaggcggtgggggtgatgcccatgcccgcggccgcgcttccggcggcgccggcgagcgcggcgatggaccccgtggagtacaacgcgatgctgaagcggaagctggacgaggacctcgccaccgtcgccatgtggagggcctctggtgcaatacattctgagagtcctctaggcaataaaacatcactgagtatagttggttccatcctgagttcacagaagtgcattgaaggtaacgggatactagtgcagaccaagttaagtcctggcccaaatggaggatcaggcccatatgtaaatcaaaatacagatgctcatgccaagcaagctacgagtggttcctcaagggagccatcaccatcagaggatgatgatatggaaggagatgcagaggcaatgggaaatatgatccttgatgaagaagataaagtgaagaaaaggaaggaatccaaccgggagtcagctagacgctcaagaagcagaaaggcagctcgcctaaaagacctggaggagcaggtatcactattaagggttgaaaactcttctctgttgaggcgtcttgctgatgcaaatcagaagtacagtgctgctgctattgacaatagggtactaatggcagacattgaagccctaagagcaaaggtgaggatggcagaggagagtgtgaagatggttacaggggctagacaacttcaccaggccattcctgacatgcaatctcccctcaatgtcaactctgatgcttctgtgccgatccagaacaacaacccaatgaactacttctccaacgctaacaatgccggtgttaacagcttcatgcaccaggtttctccagcgttccagattgtggattctgtcgagaagattgacccaacagatccagtgcagctgcagcagcaacagatggcgagcttgcagcatcttcagaatagagcttgtggtggcggcgcaagttcgaatgaatatacagcatggggatcgtctctgatggatgcaaatgagcttgtcaacatggagcttcagtagtaggagcatatcctaacaacatgatgagagcatttggaggtgcaaatttgcaacctgcaaatgctgttttgtagtagtagttgttgtcgctgtttttgtctgaaactgtagtttctatggattttggacttgctgaggaacatctgcggctgttgttgtttcaaattgagaaaatgagggacaatgggacatggtggtctcccttaatatagcgaaaaatggttggaataaaaaaaaaaaaaaaaaaaaaaaaaa

SEQ ID NO: 424 - DNA, 444 bp, Oryza sativa
  misc_feature (187)..(187): n is a, c, g, or t
gctcccggcttatactcatacttcggtctcttgatgctgtgatgtaggttcactgagagttctgatagccacggtctcgttgtgatgttgtgatactaggttcactgagagtttgttcgctgtgctcccggcttatactcatacttcggtctcttgtgatgctgtgatgtaggttcactgagagttntgatagccacggtctcgttgtgatgttgtgatattaggttcactgagagttctttcactgtctcttgtctctttcgttgatagtcctgatagtcctggatactcgcgtccagaaactactattttgtgatgctgctattatacttgcgagatactactattttgtgatgctatgatacttgcgtcttgatactactttgtgatgtcattgagacaatatggcatatactgacttcctcgttaaaaaaaaaaaaaaaa

SEQ ID NO: 425 - DNA, 272 bp, Oryza sativa
  misc_feature (135)..(135): n is a, c, g, or t
  misc_feature (170)..(170): n is a, c, g, or t
aaaaaggagaaaagagttcatactggaaagaaacttactatttcctaatcctttggagaaggatctcacaaatgaagacaaggaagtttaccatcgctataaggtgttcatgcgtttcctttctaaggaggaacntgaagcacttgttaggagtgttcttgaggaacggnaaattcgaaggaggattcaagagcttcaggaatgtcgttctgctggatgccgtacattggctgaagcaaagattcacatagagcaaaaaaaaaaaaaaaaaa

SEQ ID NO: 426 - DNA, 2575 bp, Oryza sativa
atggggtgcacggcgtcgaaggtggagcaggaggacacggtgcggcggtgcaaggagcggcggcggcacatgaaggaggcggtggcgtcgcggcagcagctggcgtcggcgcacgccgactacctccgctccctccgcctcaccgccgccgcgctctcccgcttcgcgcagggccacccgtcgctcgccgtgtcgcaccacaccgcgccggtgctcctcaccacggccgcgcccgcgctggcgccgacgccgacgccgccgccgccgtcatccacggcgtcgtcctcgctcccgccaccgacgccgctgctccccaagcaccagcaggcgccgccgccgccaccgcccacgcagtcgcatcagccgcctcctcccgtggcggtgagggctccccgcggcgggccgcgtcgcctcaaggtgccgcacatcctgtccgactccagcgtcgccagcccggcgcggtcgtcgttccggaagccggtggtggggacgccgtcgtcgtcgtcggcgtgggactgggagaacttctacccgccgtcgccgccggactccgagttcttcgaccgccgcaaggccgacctcgaggaggccaaccgcctccgcgagctcgaggaggaggagaaggcccggggctacctccacccccaccacctcaaggaagaggacgaggtcgacgacgacgacgacgagagggaggaggagatgcattgcggcggatgggaggacgacgacgaccactacgcgtcgacgaccacctcggagaccagatcggaggagggggaaatggggaacagatcggagtgcggcttcgcggccagatcggagtacggcggcacggcgccgtcggagtacgccgccgcgccgctgccactgccgctgaggaggagggacgagaggtcggaggccggggactcctcctccacggtcacggcggccgccgagatgcggatggtgatccgccaccgcacgctggcggagatcgtggccgccatcgaggagtactttgtcaaggcggccgaggccggcaatggcgtctcggagctcctggaggctagccgcgcgcagctggaccgcaacttccggcagctcaaaaagacggtgtaccactcgaacagcttgctatcgtcgctgtcgtcgacatggacttcaaagccaccattggctgttcgctacaagttggacaccaatgcgttagagatggagtcaatggaagggaagagccatgggtcgacactggagcgtcttttggcctgggagaaaaagctctatcaggaggtcaaggctagagagagcgttaagattgagcacgagaagaagctttctactctgcagagcctggagtacagagggagggatagtaccaagctggataagaccaaggcctccataaacaagctgcaatcgttgatcatcgtgacttcacaggccgcaactaccacatcctcagccattgtcagggtgcgtgacaatgagcttgcaccacagcttgtcgagctttgcttcgcgctgttgagcatgtggagatcaatgaaccatttccatgagatccagaatgaaattgttcagcaagtccgtggtctggtagacaattccatggctgagtcaacatctgatcttcaccggcttgccacccgtgatcttgaggctgctgtctcagcatggcactcaaacttcaaccgtctcatcaagtatcaacgtgattatatacgtgccctctatggctggctgaagctcacactcttccaagtggacagtaatatcccacaagaggcttacacctcgctgatctctcgtgaactcaccaccttctgtgatgagtggaagcaagcactggaccggcttccagatgcttcggcttcggaggctatcaagagcttcgtgaatgttgtccatgtcatctacactaagcaggcagaggagatgaaaataaaaaagcggacagagacatattcaaaggagctggaaaagaagaccaactcacttcgagccattgagaagaagtactaccaatcctattcaatggttggccttggccttcctggcagtgggcgcgatggcattgaaagccattcgttcgatgcccgcgatcctcttgcagagaagaaaaccgagattgcccaatgtcggcggaaggtggaggacgaaatgacaaggcatgctaaggcagtggaggtaactagatcaatgacactgaacaacatccaaacaggcctgccaggaatgttccaagccatagctggtttctcaggaacagttgttgaagcccttgacgttgtctgcaggcgagctggatcggtgcggtagaagcttgcgctgccagactttccaagaaaccgttcgttaagtctttttgggtggttcagtaatttatatagggaaaatgcaatatatatagctaaaattagtgatgagaatatgggggagaaggctcccttgatgttttgccttgttgggagttggtcattttggttgtagataaatgattttactcaggattgttgatgttcttttgcttgtcctgtgaagtgcaagggaagattacattgtacaaaaaaaaaaaaaaaaaaaaaaaaaa

SEQ ID NO: 427 - DNA, 277 bp, Oryza sativa
aagctttttttttttcaggctatgaaaactttgctgcgaaattcaaacgaatgttccccaacatagataggaattccatgcagacatttttgacaaatattagcatgctgggtgtataaaatatatactgcactgagcaaatcttaaaaatcactcttttcaagaccttacatagttggacgcacctggacctgctgcaaagaattactagtgggttatatctgctgatttgttttagaacccatacatttacctttccgtagtacctggtaagctt

SEQ ID NO: 428 - DNA, 1174 bp, Oryza sativa
tctccctccgcctttgccccgccttccctgcccttttctcttgctgagccgcttctgcattggcttgtgatgatgggggccacttctccgtcaggcctggagctcaccatggctgtccccggcctcagctcctctggttcagaaggggccggttgcaacaacaacaacgccggtggcggctgcaacatgagggacctggacatcaaccagccggcgagcggcggcgaggaggaggagttcccgatgggcagcgtggaggaggacgaggaggagaggggcgtcggtgggccccaccgccccaagaagctccgcctctccaaggagcagtcccgcctcctcgaggagagcttccgcctcaaccataccctcacgccgaagcaaaaggaggccttggcgatcaaactgaagctgcggccgaggcaggtggaggtctggtttcagaaccgtagggcaaggacgaagctgaagcagacggagatggagtgcgagtacctgaagcgctgcttcgggtcgctgacggaggagaaccgccggctgcagcgggaggtggaggagctgcgggcgatgcgggtggccccgcccacggtgctctcgccgcacaccaggcagccgctcccggcgtccgcgctcaccatgtgcccccgctgcgagcgcatcaccgccgccaccggcccgcctgccgtgcgcccgccgccgtcgtcagccgccgccgccgccccctcgcccttccaccctcgccgcccctctgcggccttctaggcccaaggtctcgcatcctaaaggccacaaaaagatgggcctcgccgtcccgtgtaaattgaaggagacgacgcagcggtagagggccccgtgtcggcgttgttgcgtcgggtccagtcgtctcagaggagtcagaggcgtggacaaaatgtttgttgcggtgtttgtgttccattggtcgttgatcttagcttgatgatctgtgattcgcgccttgctcgtctaggtttctcttgggccgacgcatgatcttttttcccccgtgtcggaccttattgggccttttgagatcgacgggccccctccttgtttcgcatgtggacatgttatttcgtccttttgggccaacaattcagcacggtggccaacggtgcgtagttcgtcgccgttttctttcaaaaaaaaaaaaaaaaaa

SEQ ID NO: 429 - DNA, 473 bp, Oryza sativa
  misc_feature (136)..(136): n is a, c, g, or t
  misc_feature (292)..(292): n is a, c, g, or t
ggagcgatttacgtccgagactcaggttcaagttttgagctaaaaccgagcgcaaattcagcgtttgtaagagtgaagccaagcaacagcggagatgaagaggtaataaggggatttgtgccttataaaagatgcnaatttcaataacgcaggcaagcgggtattttcttgaaagctgctaatttaacagagaagagtaggagcacgaacgttgcttgcatcacctgtattttttttttgtttgtttgcggggattggtggtgcattaatgaattgtttgctgcttgcaccntaaaacaggatagagatggtgtaagcacgtttgttgctgtaagaatgttacatgtagactagtacttaaaattataggggatgccaatctctgccctgatgatgttgtaaaagcagtacgcaccatgttttacctctggttgaaagctaagccgttaatggaaaaaaaaaaaaaaaaaaaa

SEQ ID NO: 430 - DNA, 475 bp, Oryza sativa
tgagggatgtgtgcatggaggtgctgcctccgatggaccactacgcgtcgagggggaactggttcatggcgcgcaagtggtcgccggaggagaacaagcagttcgagcgggcgctcgccgggctggacctgcggtgcccggactgggaccgggtggcgcgcgccatcccgggcaggtcggcgctcgaggtcatgaaccacttcagggacctcgagctcgacgtccagcagatcgagaatggcatggtgcccttcccggtctacggcgccgccgccgccggcggcgcgttcacactgcagtgggatggcgcccatggcgtcggggacttcaggaacgcgtaccggttcggcggcggcggcggcgggaagcggcacttcggccgtacgccggagcaggagaggaagaaaggcgtgccatggacggaggaggagcacaagttgttcctcttaggactgaaaaaaaaaaaaaaaaaaaa

SEQ ID NO: 431 - DNA, 277 bp, Oryza sativa
  misc_feature (147)..(147): n is a, c, g, or t
tttttgtggaaacaatatgtttctctctgtgaacatgattggtgctgtattcgtctttatttggtggatctgccaaaaataactccagaaatattgtcagtgtgttttggtgaactccgtattttgtttattcggattcgtttgccntcttatttctacggtctgccctcttgccactgtccatggctagatacaattacatggtaatcaccggtctctaatccgtggttaatgtaatgttccttcctgttcgtgtgaattgaaaaaaaaaaaaaaa

SEQ ID NO: 432 - DNA, 447 bp, Oryza sativa
  misc_feature (92)..(92): n is a, c, g, or t
  misc_feature (105)..(105): n is a, c, g, or t
  misc_feature (120)..(120): n is a, c, g, or t
  misc_feature (134)..(134): n is a, c, g, or t
  misc_feature (146)..(146): n is a, c, g, or t
cggttgtagtcaattgaaatctatttcaggagcacaatgtaccccggtggactcgaagatgatgaaatgcatcatgcggtgacctgggaaanattgtcactagcnccggagcggccatgnttgatcctgggctncccatcctgatncctaatgctaccgccacacagtcctgttctaagctggttggttggcgagccagccgcctccactacaacattcgtccatcaaagacgatggatcccgcggtgaagaggaggatctgctgatctgaatttctttgatgatttttgttggagtgtttatatcctttgtaacttttttacttttgagtttaagcatgtaatttgtttattgtatagtgtgtccagtggcgaacccagaacaaaaattactggggtccaatatatactaattatctaattattaactaataaaaaaaaaaaaaaa

SEQ ID NO: 433 - DNA, 281 bp, Oryza sativa
  misc_feature (46)..(46): n is a, c, g, or t
  misc_feature (49)..(49): n is a, c, g, or t
  misc_feature (96)..(96): n is a, c, g, or t
  misc_feature (138)..(138): n is a, c, g, or t
  misc_feature (156)..(157): n is a, c, g, or t
  misc_feature (172)..(172): n is a, c, g, or t
  misc_feature (197)..(197): n is a, c, g, or t
  misc_feature (207)..(207): n is a, c, g, or t
agacggagatgcaccctgccggaacccattcggccaacggcgccgncgncgacaataataataatcagatgatgcactccctgattccatccaatnatcccatccatccatccatagacttattaagatttctacgtncttcatactactcgtcgnncaccttttatattcncacatatatgtatgagagcccatanaataaaaaanagtggcatcagcagcgttgcataatagtagcacgttttgtgatctcaaattccgatgttctcgtaaaaaaaaaa

SEQ ID NO: 434 - DNA, 626 bp, Oryza sativa
tgaagaatcggctggttgatcgaaatcacaagcctgctaacgttcaaggatgatacagcagtaattcctattcatccggtaaagaacggttaccacccatcatgttgttttgagtggagccatctgttgtctatagagcacctgcaaaacatgttgtagcctcttccgttacttgatgctagccatccttctttgtattgtccacgtaggtttagatccaaaagatctgtacgacctttctacggcgtaggcttgttcacgcagttctcaaagtagtatctgcacaactactggttttagctgctggcaaacaatcctacgatcctgcaaccgattttggttgatgtagtttttggaacataggggggagacaggagcattgtaacggcatttagtattttgtgagcatttctctaatgctgctgctgccggcctggaaaggaatgctgcttggtggtattccattttgtaatgcctgttgtttgtagaagcagtagatatatatccgagttctatgcagcccagaagatatcttgcatatgcagccatcatcttgatcaaaggaaaaaaacaaaacattttggatttgaagtgctgcgtttttttacataaaaaaaaaaaaaaaa

SEQ ID NO: 435 - DNA, 364 bp, Oryza sativa
cagcaaacttctaaaattcataactcccaaataaaaagagataaaatagaaattcttttatctaaattcatcttagaccagtacctatcccctgtgcataaatcatgcattttagagcattttggatttttcgcatatttcggtgtttaatcgcataacgtgtactttgtttagatgattgcttaaacggtgaagaagtgaattaggtgctgacatttttcagttaccaaggaaagtcccacctccctctctctttgatcacttctctctttgttcactttgaacctatgttttggaggttattgaaaatgtttgtaaatcttgcatgtcgattgtacactaataaattaaaaaaaaaaaaaaa

SEQ ID NO: 436 - DNA, 658 bp, Oryza sativa
  misc_feature (19)..(19): n is a, c, g, or t
  misc_feature (111)..(111): n is a, c, g, or t
  misc_feature (155)..(155): n is a, c, g, or t
  misc_feature (159)..(159): n is a, c, g, or t
  misc_feature (183)..(183): n is a, c, g, or t
  misc_feature (200)..(200): n is a, c, g, or t
  misc_feature (240)..(240): n is a, c, g, or t
  misc_feature (243)..(243): n is a, c, g, or t
  misc_feature (247)..(247): n is a, c, g, or t
  misc_feature (254)..(254): n is a, c, g, or t
  misc_feature (281)..(281): n is a, c, g, or t
  misc_feature (326)..(327): n is a, c, g, or t
  misc_feature (494)..(494): n is a, c, g, or t
  misc_feature (573)..(573): n is a, c, g, or t
tgagaatcttgtttcggantcgtacaggaacatgggtatgttgctacactgcgcggagggatttacgaacgtgcacgtccattttatccatgtgtataggaactttgatgnttggacattgtaccttcttgagggtgctcaaagtgctaacgccnaacntatctttggtatacggatgttacntaccattttctggaacngctttgcttatttgtggtcagccggtacattggactccgnccnttgngctgagnccccaaaagtattcctccagtggccancctgaaaaattccgtagtgtcgacgttatggtattttgtttctanncccggtagtcccgtccattgtgcgaccggtgaggcgcgaaagcgtatgtgtgtcctacaaatttgtgagtcaccatcccagttggtagctccggccaacctgcaaggacaggtcaagtatccagaggcgactgatcgtaccgtgagttgtccgcatggtagccttgntcactgtacccggattgttattggtgagagtcatttgtgcaccattcttgggcaacctgtgtacatagtcatgcatatntgtatggatcatatggcgtcagaatcatcagataatataattgagacgttttccagttaaaaaaaaaaaaaaaaaaaaaaaaaaa

SEQ ID NO: 437 - DNA, 919 bp, Glycine max
  misc_feature (1)..(2): n is a, c, g, or t
  misc_feature (14)..(14): n is a, c, g, or t
  misc_feature (25)..(25): n is a, c, g, or t
  misc_feature (521)..(521): n is a, c, g, or t
  misc_feature (725)..(725): n is a, c, g, or t
  misc_feature (735)..(735): n is a, c, g, or t
  misc_feature (919)..(919): n is a, c, g, or t
nncgctacgccctngtggattacgnctgcgcgcaactaaccctcactaaagggaacaaaagctggagctccaccgcggtggcggccgctctagaactagtggatcccccgggctgcaggctgagtctgaacggaatcccacttaaaagtcgttctccttcctcttcgcagctgttatatagtactattttcatttcatatgtttatgcacctctatatatacatagacacatgtaaatggttgcaaaggaagataagataggtaccagctatcacatagtttatttaatccgttatatgccacctgatatataggcatattagctagttaggtaggtatagtagtttaagttaattcaaccatggaagacagggatcactgttgttccaacaattcaacgatgatcacaacaacaaagaaaagaacgggtagaagaagtccaacatcggataagctcaagaatcaacaccgcgagaagcagtcgatgaaaccttaccgtggaataaggatgcggaagtggnggaagtgggtggcggagatcagagaacccaacaaaaggtcgaggatatgtgtgggttcttacacgacacccgtggccgccgcacgtgcctacgacaccgctgtcttttacctcccgggtcccaccgcgcgccttaacttccccgaactcttgttccaggacgacgaccaggaaggcagtggatcggtgcagcacggcgcagcanggaacatgtncgctgattcatttcgcgaaagccacgcagtccgtcgcagagtcgacgctctccaaaccgcgcttaccacccacgcgccagtacccactctctcaactcaagcccgacttgtacgagtccaaaactcgagaagcttcagatgaataaacaaaatcatatcaatccatataataatttctagtctn

SEQ ID NO: 438 - DNA, 771 bp, Glycine max
gggggaaaaatatttgataaatattaaatttataatttatctcccccccccccaggtgggtagagcgctgtagcatcagcacgccaaacgctcaattaaccctcactaaagggaacaaaagctggagctccaccgcggtggcggccgctttagaactagtggatcccccgggctgcaggaattcggcacgagggcggagattagagaacccaataagcgttcgaggatctggctgggttcttacgccacccccgtcgccgccgcacgcgcctatgacaccgccgtcttccacctccgaggcccttccgctcgcctcaacttccccgaattgctgtcccaggacgacgacgtttcgacccaacaacagggcaacatgtccgccgattcaattcgcaaaaaagccacccaagtcggcgccagagtcgacgcgctccaaaccgcgcttcagcaatcctcgtcctcacactccgctaattccagccacgtcagcagctctgacaaaccagacttgaacgagtatcccaaacctgaagattagtaattttcttccaccttcaagattaatattgatccaccaatcacgcgtcctgatgtgacatatatatagggcttcaacttgccctcttcacctatgctaatttgaagaagaagaaaaaaaccttattatatttgtcatatgattatatatatatcttagtagatatgtttcttccaaataaaaaaaaaaaaaactcgagggggggcccggtacccaattcgccctatagtgag

SEQ ID NO: 439 - DNA, 761 bp, Glycine max
atacagtgagcaaagttagctgaaaattaaaacatggtttccgccaccgtggattccgattttgcattcttggaatctgttcaacaatacctacttggacatgattccatcaatctcatgtctgaaacccaccaagctgcatctcatgatccattttcagaccctaataaatgtgatggtgattcagggaacattgctttccgaagtgaggatgcaacggctgtggtagcgcgtgatcatgcgccaccaacatggaagcattacagaggggtgaggcgtagaccgtggggaaagtttgcggccgagattagggatccaaagaagaacggagctagggtttggcttggcacgtatgataccgaagagaaggccgctttggcatatgacaaagccgctttcaaaatgcgaggccaaaaggccaagctgaattttcctcatcttattgattccgacaattccgatgaattgtcggagccagtaatgatgacaacttccaagcgaagtttgttagaaatttcatcaccgtcgtcctcgtgttcagatgatagctcagaatcacaagggacaaagaggaggaagagcctggctgaactactgaataaattagccaagaatagaagccaagtcaaggtggaatgttgaagtggctagaggaatatgcatgttgtacaatttgatcaatcattaatatgagacttcaacgattgtaatgtaatctggtgttcatagaattaatgcaattttgttcccaaaaaaaaaaa

SEQ ID NO: 440 - DNA, 763 bp, Glycine max
  misc_feature (1)..(1): n is a, c, g, or t
  misc_feature (12)..(12): n is a, c, g, or t
  misc_feature (18)..(18): n is a, c, g, or t
  misc_feature (25)..(25): n is a, c, g, or t
  misc_feature (28)..(28): n is a, c, g, or t
  misc_feature (620)..(620): n is a, c, g, or t
  misc_feature (713)..(713): n is a, c, g, or t
natgatttgagnaagggnataaggncangggctagcgcgcatttaccctcactaaagggaacaaaagctggagctccaccgcggtggcggtcgctctagatctagtggatcccccgggctgcaggaattcagcacgaggacgaaccaaagttaactactttagagagagagagagagagagagagagatggagagtgaaggaagaagagaaggaggagagagagaaacaacagcagcgacgaggaaggtggagggtgctgagagaagatacaaaggaataaggatgaggaagtggggcaagtgggtcgctgaaattagagaacccaataagcgttcaaggatttggctcggttcctattctacccctgtcgccgccgcacgtgcctacgacacggccgtcttttacctccggggaccctccgcacgcctcaacttcccggagcttctcgtcagagaaggcccggccgccctagtcgccggctgcgacatgtcagcggcttctattaggaagaaggccaccgaggtctgtgctagagtcgatgctcttcaggcaacccttcaccaccactacgtgcccccgcggcaacttctctctggcggtggtggtgggtccggggatntcccggtgcgggttgttgacctgaataagatgcctgaacccgagagttccgactgtgagtgggatgtgaattgaacgaaaaaaagtacatgtnttcgtattcggctgctaagcgccgggtcgaggcaagctgatttgccgatg

SEQ ID NO: 441 - DNA, 763 bp, Glycine max
  misc_feature (670)..(670): n is a, c, g, or t
  misc_feature (690)..(690): n is a, c, g, or t
gggctgagctgctagtggattccgccaagctctaatacgactcactatagggaaagctggtacgcctgcaggtaccggtccggaattcccgggtctacccacgcgtccgggaaatcgagggtcttccaaagttgaattttctgaagatgaggaaaccctcatcatcaggatgtataaactggtggtctataattgctggaaggattcctggaagaacagcagaggaaatagagaagtattggacttcaagattctcgggctctagtgaatgaagctccggagtactacgattggtgttcagtctaggacgagcaagaagattttgggtgcaagattagtgtgattttgtgggacataaaaactgaattaaagttggcatagtttataggtatttgtattggctataaaaaaagaagtggggcagcaactatagaagctggtttgtgttatatttctccatcttgaaatgttccttggtgtgatattttccatcttgaaatgttccttggtgattggtcttttctgaattgtacttagtgctgttcatcttcgtgtatcttattcatttaccattttggctttttatcttgcgtctgaaatctgtattggaaatgagaattaattagagacaggttcagtattgtcaaaaaaaaacaaagaaaaatatatnatttcctgggttgctttgtngtattgtcgcatcgtaagatactgatcgatcgtatcgtgtataaaaaaaaaagaaaaaaaaaggggggggcct

SEQ ID NO: 442 - DNA, 874 bp, Glycine max
  misc_feature (1)..(3): n is a, c, g, or t
  misc_feature (687)..(687): n is a, c, g, or t
  misc_feature (702)..(702): n is a, c, g, or t
  misc_feature (710)..(710): n is a, c, g, or t
  misc_feature (792)..(792): n is a, c, g, or t
nnnaattgcttgtcatttgtaccctcactaaagggaacaaaagctggagctccaccgcggtggcggccgctctagaactatgtgtatcccccgggctgcaggaattcggggcgagattcaatatacaacactgaaactttcaaagctcttttgagaacttgttattgcaatggctgacatagatcgctcctttgataataatgtttctgctgtttctactgagaaatcaagccaagtttcagatgttgaattttctgaagctgagaaatccttattgccatggtgtataatcggtgggagaggtgtctttgattgctggaagaattcctggaagaactgcagaagagatagagaaatattggacttcaagattttcgactagccaatgatcggtggcagaaaacgaagcaaggaaatttttggtgcctacaagtcattacagtgactttgtggggatatgaaatggaaattgatcctattaatcatatgggtacttatatttgcattttgcggtaaccaacaaaaaggggcatgccattctaaaagcccttatgtgtaatgttacttaattttatctttgtaatgttcccaagtgttttaggcaatctatgattcagatctgctcgatcatggcaagaacagtatgtacttaattaatgcagatcacctgcatgtgcatgtgtaaanaaaaaataaataaanacaatatnattaataatcactccgagggggggccaggaactccaattcgccctatagggagtcgtattacgcgcgctcacttggcgtcgntttacaacgtgtgactggagaaaccctggcgtaccccactaatcgccttgcagaacatcccctttcgcagctggcgtatagt

SEQ ID NO: 443 - DNA, 770 bp, Glycine max
accagagatgtctccatgagcatgacgcgccaagctctaatacgactcactatagggaaagctggtacgcctgcaggtaccggtccggaattcccgggtttacccacgcgtccgtgaagcttctcgattactcttctagttttccggtggacgaaaatgtccctgaacctcaattgaatcgcggagaaaagtttgaggctgaagctgaattggatggtggtgaacgtgttgcgcctaagaaccctaggtgggctgtttatgggaggggtttggaggatgtcactgagtttttcaatagtgacaactatgaccctactgctaaaacccctggaggtcgccggaagttgtttaataaggaggagaaggttgtgttgaataagaggataccagacttggcagctgctacttcagataaatggcttcccctgcacactctcgctgcttgtggagaatatcaccttttagattctctgttgaagcataatgttgatatcaatgctgtggataaggatggtttgactgcccttcacagagcagcaatgtggagaaaagcaggccatagtcaattatctcctgagagactcagctaatccctttgtcatgataatgaaggagccacattgatgcactatgctgtactaacagcttctacccggacaataagaatactcttattgtatatgaggatataaatctccaggacaatgatggctggacaccattacatcttgctgttcgagctcagaggacggatatagtggagcttttgc

SEQ ID NO: 444 - DNA, 717 bp, Glycine max
  misc_feature (1)..(3): n is a, c, g, or t
  misc_feature (530)..(530): n is a, c, g, or t
  misc_feature (538)..(538): n is a, c, g, or t
  misc_feature (545)..(545): n is a, c, g, or t
  misc_feature (583)..(583): n is a, c, g, or t
  misc_feature (670)..(670): n is a, c, g, or t
nnnaaggggggaaggaccttaccggactagtgcctgcgcgcaattaaccctcactaaagggaacaaaagctggagctccaccgcggtggcggccgctctagaactagtggatcccccgggctgcaggaattcggcaccaggccaagagaacagatgtagaagctgaagtggatcagatgttctcgacaacactaattacagaagttggatatggaattgttccctctttctgaatatgctgtgtagaacaaatggccagaagacattgaagatgctagaggatcatgattaatagaaatggaaaccacttgtgtactaagttattctgctgataatgtattttttatgtaatctaattgcttgcagttgtactaatcggatgctttattattttgtttattgtcttttgaatgaaacttgtatttgtaaatacagtccttgtattaaattattaaattacagtcaaaaaaaaaaaaaaaaaaaaaaaaaaaaaaaaaaaaaactcgagggggggcccggtacccaattcnccctatantgaatcntattacgcgcgctcactggccgtcgttttacaacgtgntgactgggaaaaccctggctttgcccaacttaatcgccttgcaacacatgcgcctttcgccaacttgctgtatagcaaaaaagcccngacctatcccccttgccaccagtgtcgcaggcttaatggtcaatggg

SEQ ID NO: 445 - DNA, 706 bp, Glycine max
  misc_feature (591)..(591): n is a, c, g, or t
gatgcgtgagcgcgcgtaatacgactcactatagggcgaattgggtaccgggccccccctcgagttttttttttttttttttttttttttaatgaaaattcaaataagctaaataagccattgaaaatacaagtctcactgtacagtacaatcaccataaatcaataatttaaagtctgaagagaatgaaactaaagatgaaaaagctttaaagctttacattgagaacatgaggaggcttgtacagatatgtttgtgcatgccacaaaactagtatttgaattcaattaagatgaaaaatctcaaagcctcagagtgagatcaggagacacagatgtttgtgcttgaggtgcagttgctactacaaaactagtatttgaattatgagcatgctcaccatgcctcaaattaacataacccctttcatcaatctgtctgaaacttccaggccaaaacagaccaacatcatcatcttccacgaagatcgtgtccgaaaatagtctttcccgaatttcgctgcagcactcatatcaggagccctcattgaatgatgcacatgcccttggtgcattgcagcatgagcttcgagtncaagcgaccgaaaagcagaaccatggagaggcacctgagccccggggatcactagtctagagcggccgcaccgggtgagctccacttttgtcctttatgaggtaaatgccgctgg

SEQ ID NO: 446 - DNA, 895 bp, Glycine max
  misc_feature (1)..(4): n is a, c, g, or t
  misc_feature (463)..(463): n is a, c, g, or t
  misc_feature (470)..(470): n is a, c, g, or t
  misc_feature (619)..(619): n is a, c, g, or t
  misc_feature (686)..(686): n is a, c, g, or t
  misc_feature (716)..(716): n is a, c, g, or t
  misc_feature (737)..(737): n is a, c, g, or t
  misc_feature (756)..(756): n is a, c, g, or t
  misc_feature (803)..(803): n is a, c, g, or t
  misc_feature (805)..(805): n is a, c, g, or t
  misc_feature (812)..(812): n is a, c, g, or t
nnnnggattgaggtcgacctgatacgccagcgcgcattaaccctactaaagggaacaaaagctggagctccaccgcggtggcggccgctctagaactagtggatcccccgggctgcaggaattcggcacgagcacaaacatgatgactccaaacttgaacttggaaatcgaaaatcattcagaaggcagcagccaagtggcttcaaatgtatccttgcatgaagcatctcatgatcttacaaagggcagcaccaccacttcctcctgtctcacaaaggatgaaactgatccaggtttcattacccttgacttgacactcaacttcaataattccggtgatggcgagttgaaagtctcgagtgatgctagcagtgaagttggagctgaagctcctgcttcagcatcagcaactccaagggttttctcttgtaactactgcaggaggaagttctatagctctcangcattanggggtcatcaaaatgcacacaaaagggagaggacgatggctaagcgcgcaatgcgaatggggatgttcactgagagtttacaagcttggcatctctacctcttcatggtcacctttcaggtctcttggccctgaagctcattctgcaantgcacgaagaaccgtgccatcctccgtgacagcactgagggctcctgatatgagagctgctgcaaantttgagagaaaccaaatttggatcactgtnttcaaatgagatgggatgagntgatctttgggcccctggntcaaacagtagaccaacaaagagctctggtaaggtatgagaatgccnanagtcaanagctagtacttccatgtgcctctcacaccagttctgattttctgtctacaatgagaacctagttaggttagacatgcatcctc

SEQ ID NO: 447 - DNA, 794 bp, Glycine max
  misc_feature (7)..(8): n is a, c, g, or t
  misc_feature (513)..(515): n is a, c, g, or t
  misc_feature (687)..(689): n is a, c, g, or t
  misc_feature (728)..(728): n is a, c, g, or t
  misc_feature (738)..(739): n is a, c, g, or t
  misc_feature (742)..(742): n is a, c, g, or t
  misc_feature (754)..(758): n is a, c, g, or t
  misc_feature (764)..(766): n is a, c, g, or t
  misc_feature (785)..(785): n is a, c, g, or t
atcattnntccattatcctgaacgctgtatcatggttcatgaataacgaagtaaaatacatatgagaggaaaccattaataacatgtgagattaaaataagctaaaatcgccattggaaatacacatctcactgtacaatgcacgccctattaattaataatttcatgtctgaagagaatgaaatcaaagactaaaaaatctcaagagaagtgatacatacacacataaaaactctgataattaaatccctcacaatgaaaatgagtggttgagaaaattttggctgaatgcaaagcaatggatgagtcagttcttagccacttatttattactttgtgaggcctttgcttgtgtatgtatcatcattcttaagccttaaacttaaagcttcaatgtgagatcaggagatgtagaagcttgtggtggaggaggcaccattggaattaaactagcatttgaactttgagcatgtcctacattaacaccagctccttgttggtctacctgtctgnnnctgccaggccaaaagaatccaacatcatcatcttccacgaaaaccagtgatccaaattggtttctctcaaattttgcagcagctctcatatcaggagccctcagtgctgccgcggaggacggcacgtgtcttcggtgcattgcagaatgagcttcaaggccaagagacctgnnnggtgaaccatgaagaggtagagatgccaagcttgtatanctctcagtgnncanccccattcgcannnnncgcttnnncattgtcctctccattttntgagcattt

SEQ ID NO: 448 - DNA, 1052 bp, Glycine max
  misc_feature (1)..(2): n is a, c, g, or t
  misc_feature (583)..(583): n is a, c, g, or t
  misc_feature (703)..(703): n is a, c, g, or t
  misc_feature (712)..(712): n is a, c, g, or t
  misc_feature (730)..(730): n is a, c, g, or t
  misc_feature (750)..(750): n is a, c, g, or t
  misc_feature (917)..(918): n is a, c, g, or t
  misc_feature (993)..(993): n is a, c, g, or t
  misc_feature (1005)..(1005): n is a, c, g, or t
  misc_feature (1030)..(1037): n is a, c, g, or t
  misc_feature (1045)..(1045): n is a, c, g, or t
  misc_feature (1047)..(1050): n is a, c, g, or t
  misc_feature (1052)..(1052): n is a, c, g, or t
nnccgctctattatcattttcggtgcacgcaacccaaccctcactaaagggaacaaaagctggagctccaccgcggtggcggccgctctagaactagtggatcccccgggctgcaggtggatttgaagcttaacctttcctcaacctcaaacagtgcttcttctgacctgactaaagagaagaacatcactgctgctgcacctcctgctaacgacccagcaaagccacctgcaaaggcacaagtggtggggtggccaccagtgaggtctttcagaaagaacattgttcaaaggagtaacaacaatgagggcgaaaaagccgccacaagtagtagcaacaatgtgaacacgggagcagctttcgtgaaggtgagcatggatggtgctccttatttacgcaaggtggatttgaagttgtacaagagctaccaagaggtgtgggatgcgctggctaaaatgttcagttcattcaccattgacaagtgtggatcccaaggcatgaaagacttcatgaacgagagcaaattgattgatcttctcaacggctctgatacgtaccaacctatgaagacaaagatgctganctggatgctcgtggtacgtaccgtgggaaatgtcgtggatcatgcaagcgcctggtataatgaaaggatctgagcatcggctacaccaagacagtgggaaggcaagacagagctaagcanattgtaatncacttcgacacatctgtntattgtgcttttgcgcacgnaagcatatgtattctcagccaaggtgctaatagaaccagtgtcactatgtcgacattctagatatttctgggttggatggattttatagagaaatttattgattagcagaaaaaagagtgtttttgcccccctttgtaccaaccggctgtaaaaaaaaaaaaaaaannaaaaaatgggccgccatcccttttgagtccctcctgcctttaacgaagaaacgtcattactgacacctttctggngtaaagcccacnccccccatgcgcttaggagcgggtnnnnnnnngggtgccntnnnncn

SEQ ID NO: 449 - DNA, 1240 bp, Glycine max
  misc_feature (625)..(625): n is a, c, g, or t
  misc_feature (690)..(690): n is a, c, g, or t
  misc_feature (717)..(718): n is a, c, g, or t
  misc_feature (774)..(774): n is a, c, g, or t
  misc_feature (1227)..(1227): n is a, c, g, or t
gggggggtttgataaaataaagtccgaatcacgccacccgcgcaattaaccctcactaaagggaacaaaagctggagctccaccgcggtggcggccgctctagaactagtggatcccccgggctgcaggctttcaccgaagaataacttgactttcccgaactccacctgagaaaaagatacccttaattcgcaggcgcgtcttgtgttggacaacaaccacaagatgattaacttcgaagaaaccgagttgcgactcggcctccctggcaacgactcagcactcaagggaagtgctgccaagagaggcttctctgaaactgcttctgttgatttgaagcttaatctttcttcttgcattaacgactctgcctcggattcaccctcatctgtgtctacagagaagcccaaagagaacaagactaccactgctgaacctcctccagctaatgatccagcaaaaccacctgcaaaggcacaagtggtgggttggccaccagttaggtcatttagaaagaacatagttcaaaggaacagcaatgaagaagaggcagagaagagcacgaagaatgctttcgtgaaggtgagcatggatggtgcaccgtatctacgaaaggtggacatanagttgtacaagagctaccaggagctgtcagatgcgctggctaaagatgtcagttccttcacgatngaaaagtgtgggtcccaagggatgaanngacttatgaatgagaccaaatgctctgactatgtacccacatatgaagacaagacngagaactgatgcttcgcggtgatgtgccctgggagatgttcgtgaatcatgcaagcggttctcaaattgaaagggttcaggcatccggctttggcccaaaccctgggaaaatgcaaaaccgagctgaaaaaggagttctttctctccacggggaccaattggctggcccgaccggtcttattggggaaaaggtaaacaacggggccttgtctcttttggattttttttggggttattggattagaaaaatgtgaaaaaacaaaaaaaaaaaactggggggggccggcccattccctttgggggtatatccgctcatcgtcgttttacgggggagtgaaacctttaaccatataacctgaaactcctttcctgggtataaagaagcccactgcccttccatttgacataggaagggccccctgggctttgcggggggtttcgccagatcatccnacataccttttta

SEQ ID NO: 450 - DNA, 922 bp, Glycine max
  misc_feature (1)..(1): n is a, c, g, or t
  misc_feature (423)..(434): n is a, c, g, or t
  misc_feature (780)..(780): n is a, c, g, or t
ntgtccctgttgtgaacacccccagctctaatacgactcactatagggaaagctggtacgcctgcaggtaccggtccggaattcccgggtcgacccacgcgtccgaggcaatcgggctagcaccaagagcagtggaaaagtgcaagaacagaagctagagtcaaatttgtaaattccactttcgacaacaatctgctctatctgttgctcttgggcgtccacggaaagcattaatgctaatttctcgagcaaggggtagtctaatataggagccaagttgttacataatgtgtcggtaccatttcttaaaaatattttcctggatatgaatggggtattttatatatgtgagaaaatatataatttggaaattagggacaagaaataatgaagtatgttttatataaaaaaaaaaaaaaaaannnnnnnnnnnnaaaaaaaaaaaaaaaaaaaaaaagggcggacaatctaaaggatccaaagctaacatagcatgcatgcaacaaaaaaaatataaaaaaaaaaaaaaatgggggcgcctctttgagggaacccagtcaacggtcgcggctgtgaaaacccttagtttttctatatggaccccttaacaaaaatatccgcccgggttaacatacgtgggggctgagaaagcccgtgcgttccacatttcaatcgtttggcaacctgccctttttaggggatgctaaataagaagaggtccaccccgtccgcttttcccaatatgtgcaccttactgtaaattggcacccccttgggcgnctatatacgcggggggggggggtttcccacagtggacgataacctggcaagccctaacgccgctcttttttttttcatttatttctgccgaccggcgcgttcccgctaggctaagagtgggcccctttgggcccgtcaggct

SEQ ID NO: 451 - DNA, 922 bp, Glycine max
  misc_feature (19)..(19): n is a, c, g, or t
  misc_feature (21)..(21): n is a, c, g, or t
  misc_feature (697)..(697): n is a, c, g, or t
  misc_feature (922)..(922): n is a, c, g, or t
cagtcccagtgctattcancntcagcgcgcaattaaccctcactaaagggaacaaaagctggagctccaccgcggtggcggccgctctagaactagtggatcccccgggctgcaggaattcggcacgaggggagctatagccataaggagaaaaactttcaaagaggtgaaagcaaaagagttcttcttttccttttttatatatacttgggtgctaagctgtgtgagttcattgacaagcctgaaatggcaactatgctgacaaaggagcatggtctgaacctcaaggagaccgagctttgcctcggtttgcctggtggggaggcggcggcggcggcggcggcggcggcggcggtggtgaggtggaaactccaagggccactgggaagagagggttctctgagactgttgatctgaaacttaatcttcattccaaggaagatctgaatgagaatctgaagaatgtctcaaaggagaagaccctccttaaggatcctgccaagccaccggctaaggctcaagtggttggttggccaccagtgatgtcatacaggaagaacatgatggcagtacaaaaggttagcactgatgatgtggcagagaagacaacaagcagcactgctaatcctgcggcatttgtcaaggtttccatggatggagcaccttacctgcgcaaggtggacctcacaatgtacanaagctacaaagaggtatctgatgccttggcccaaatgatcaacttcttcaccatgggtaactattgggccccaaggatgatagacttcatgaatgatagcgagttgatgaatctcttaacagctctgagtatgagcaagctataagataatgatgtgactgaatgcactgtgtgagtaccatgcgaatgcggttgatgatgctgctgcttcgatatgtatgggan

SEQ ID NO: 452 - DNA, 869 bp, Glycine max
  misc_feature (641)..(641): n is a, c, g, or t
ctggttgatcgccttgttgctgattacgccaagcgcgcaattaaccctcactaaagggaacaaaagctggagctccaccgcggtggcggccgctctagaactagtggatcccccgggctgcaggtgaatgagaggaaactgatggagtctggaaatgggattgaatacatgcccacctatgaggacaaagatggtgactggatgttggtcggggatgtaccctggaagatgtttgttgaatcatgcaagaggataagacttatgattagctcagaggccgttggtttaggtccgaggtctacttcttcaaaatgtacgggttccacctagctagctagaagaataattaattagtgcgtaataatgataagctgatagctgataattaagcattccttggacaccttcaacgtttacaagctccggttagaagaagagtgaatttggtacagggaaatatccatgcatggtgcttgatgtacatgtccctttagcacctctggttaattagttacttttgttttgactttaaatgaagaactagaacaaaaaaaaaaaaaaaaaaaaaaactcgagggggggcccggtacccaattcgccctatagtgagtcgtattacgcgcgctcactggccgtcgttntacaacgtcgtgactgggaaaaccctggcgttacccaacttaatcggcttgcagcacatccccctttcgccagctggcgtaatagcgaagaagcccgcaccgatcggcctttccaacagttgggcagcctggatggcgaattggaagcgctcttgtgccgcgcatttaagcgcgggggtgttgtggtatcccccagcggaaccctacacttgccctcgccttgcgccc

SEQ ID NO: 453 - DNA, 837 bp, Glycine max
  misc_feature (805)..(805): n is a, c, g, or t
  misc_feature (821)..(821): n is a, c, g, or t
  misc_feature (827)..(827): n is a, c, g, or t
  misc_feature (834)..(834): n is a, c, g, or t
  misc_feature (836)..(837): n is a, c, g, or t
ggtggtagcccctctagaataccccaagctctaatacgactcactatagggaaagctggtacgcctgcaggtaccggtccggaattcccgggtcgacccacgcgtccgatggccacccgtgaggtctttccggaagaacatgttcgcagcccaaaagagcagcggcggagaggaaagcgaaaagagcagccctaatgcaagctttgtcaaagttagcatggatggagcaccttacctccgcaaagttgacttgaagatgtacaagagttacccagagctctctgatgccttgggcaaaatgtttagctccttcaccattggaaattgtgaatcccaaggcttcaaggatttcatgaatgagagcaagttgatggatcttttgaacagctccgactatgtcccgacctatgaagacagggatggcgactggatgcttgtcggtgatgtgccatgggagatgtttgttgaatcatgcaagcgtttacgtatcatgaaaggaaaggaagctattggactggcaccaagagccgtggagaaatgcaagaacaggagctagactagtagttaccagtccaaaatctgcttcatcatcattagcggtgcctagttgacttagtaactgaagcaagggtaagctgcagcagacacagagggagagagcagggtgtttagaaaatatagttaagtaatctgggtatcattattggttggtatataatttatactttcaaccaaagtggtgagaggtcgtagtataattatggacacaaacgattatggactctaaattatgtgcacagattgntttattctttacttgnggcctngcttaanann

SEQ ID NO: 454 - DNA, 731 bp, Glycine max
tactaatccgccagctaaagctcaggtggttggttggccaccagtgagatcatacaggaagaacatgatagcagtacagaaggtcagcaatgaggaagtagcggataatactacaatcagcactcttgctaattctggggcgtttgtccaggtttccatggatggagcaccttaccttcgcaaggtggacctcccaatgtacaaaagctacataagacttatctcatgccttggccaaaatgttcagctccttcaccatgggtacctatggggccctaggaatgatatattcatgaatgatagcaaattgatggatcttcctcccagctctgagtatgtgcccccccatcaaaatactgatggtgactggatgctcgtgggtgatgtcccatgggagatgtttgtggtggtcatgcaaccgcctggcgaaattatgaatggatcagaaacgattggtccttgcgtccaaaacattggaaaaatgcaaaagcagaaggggaagctggcccaatacaacgttctacgagagatcccgtacgccactggacctatggaacaaattatatcacccacttcagctacactatggagcggaatgttgttggttgaatgtgtctggtgtttggcgttttgttcgtataaagattgtgtagtgtaaaacaacggtgccttaacctatacggtctggcgtgtttaggatgtgatcgtccaggctgtccggatggtatttg

SEQ ID NO: 455 - DNA, 1784 bp, Glycine max
gaaaggttgaagaattatttagaatgataaaagccatgaaaacagtgagttacttaccctcttgtgtgtgaaatgacgaaaccctaggagaaggagagtaataaagaaagaaatatgtggtgtaagcaagcaacatggagtgtccacttccgcttcttccactgaacaatcataggaagatagcatcaccttgtcgtcagcaagggcagcatgcacagaaaagtccagctcacacattcctccacgtgtcacaaacccatttccctctaaaaagacaggacgcaccatgcgtccttgtattatacgtccccttgtcctgcccctgcccctataccatagaacattagtacccccacacacacccctcctctatctttcactattattgccacacaaatcaattaactgaatgcttagagagagaaagaggagaaggagtagtgataaggtgatcatagagcatattataagagagtgaaaactaatggaggttggcctcaagaaggagaacatggggtttgaggaaactgagttaaggcttggactgcctggaaacggaggcactgaagaagtgctcatcaggaagaggggtttctctgagactgaaactggtcatgaagatgagtctgccaccactgtggatttgatgcttaatctttcttctaaggaggccgcaaccactgctgctgctgctgcagatccaactgataagcacaagactttgcctaaggagaagacccttctgccagcagatcctgctaagcctccagccaagacgcaggtggtgggttggccacctgtgcggtccttccggaagaacatgttggctgtgcaaaagagcgttggagaagagagcgagaagaacagcagccctaatgcaagctttgtcaaagttagcatggatggagcaccttaccttcgcaaagtggacttgaagatgtacaagagttaccgagagctctctgattctttaggcaaaatgttcagctccttcacctttggcaattgtgaatcccaaggaatgaaggatttcatgaatgagagcaagctgaatgatctcttgaacagctctgattatgtcccaacctatgaggacaaggatggtgactggatgcttgtcggtgatgtcccatgggagatgtttgttgaatcatgcaagcgtttacgcatcatgaaaggaaaggaggctattggtcttggtcttgcaccaagagccatggcaaaatgcaagaacaggagctagactagtcgcacaattcatgacctgccccatcctttgtaattgtggtgcccagttggcttagtaactaaagtaaggataagctgcagcagacacggatggacattgcagggtgttgaattatagttaatttgtgtatcattatggtttgttataatatttcaaacaaaacaatgagatgcatgtctaattaagtactaattatgaacaggaacataatgactctcaatcatgttgttagacttggctttcttatatatctttgcttgttctgtgtgagtgcttgcttaataataattttaagatgtgtttgtctgttgtagttgtagcgacatgttatcatgctttacatttaaaattgtcttgtaaaggttttccttatcattatgagattccttggtattaatcatttttcatataataacaaaattgtatttattacatttacgttagtttttgttgtgatcatcaagagccgaatatatagtactggaaatgttccctgaacatggtggatgggaaacaagaacatgtgcgtgttcat

SEQ ID NO: 456 - DNA, 839 bp, Glycine max
  misc_feature (50)..(50): n is a, c, g, or t
ccccctccccccccccccccccccccagcagatgggtacggctggcatgnagcatgcgactgccggcgtcgctattaaccctcactcaagggaacaaaagctggagctccaccgcggtggcggccgctctagatctagtggatcccccgggctgcaggaattcggcacgaggtttcttcaccaggctgacaatctgcggcagcagacattacaacaaatgcttcgaatattaacgaccaggcaatcggctcgtgctcttcttgccatcagtgattatttctcacggctgagagcgctgagttctttgtggcttgccaggccaagggagtgaagcatttcacagccccattagtggacttctttcatgcctgactcccttaaacaccgatgatcattgaatcttgtgctctgaatgagttcaatggaagctggtgtcttttgacaatgaattcctcttgaagcctagttgtgatgctataaacattaaatgctatgatttttctactctgccaactgctggtgtggtgcaacatttttctttaagcttttgtggttttaaaatagtctcaataatgtgattatataggtgtatgatagatagaagctgttgaagggaaaaatgtagaaatagtgtatctgtatttttaggttatagctgttcattgtatatcagaaatcagcgtatatccgagggggtatttacctctctttaggttcatttcctgcctaatggtttgtggttggttgcacatagagctgcgaggagtatgtatatagacgtactgtcgtgctatagttagaagacagtactgacgtgataggatataaatcagcgtatt

SEQ ID NO: 457 - DNA, 968 bp, Glycine max
  misc_feature (864)..(864): n is a, c, g, or t
ccccccccccccccccccccccggccgtggggcttgatgatcgcctggtaggatcgccgcgcgcaattagtcctcactaaacggaacaaaagctggagctccaccgcggtggcggccgctctagaactagtggatcctccgggctgcagggaaaacacctgctgagaggtgttttttgcggcttggtggctttcgctcatctgaactcctcaagctgctggttagtcaattggagcctctcacagagcagcagctgatgggtattaccaacttgcagcaatcctcccaacaagcagaagatgcattatctcagggcatggaagcattgcaacagtcccttgcagagacattgtccaccggagcacctgcctcatctggttcatcagggaatgtggcaaattacatggctcatatggccatggccatgcgtaagctagggacacttgaaggcttcattcaacaggctgacaatcttcgccaacaaactcttcaacaaatgcaccgtatactgacaactcgccaatcagctcgtgcactccttgctatacatgactacttttcgcgtctgcgtgctctcagttcactctggctagctcgccctagagattgatggacgcgctaaatagtatggcaaattaattatcatggatccatcactagcaatacttgctcatcataactcttgacatgtcttcttgttgttttgctgtcctctctgcatcactgacggtagtgcttcattgagtcagtctatatacgaaatcgatgacatgatgtatgaatattactactaatattgttcattgtaatgatgaaaacaaatagaaacactcgatgtgggcccggtacccacttcgcctatgntgagcgtatacgcgcgctgactggtcgcgctctacacgacggattgcacttccctgcgtacccaacttatcgctgctctcatcctcttcctcatgctgcgaatt

SEQ ID NO: 458 - DNA, 793 bp, Glycine max
  misc_feature (1)..(2): n is a, c, g, or t
nnaagtgaagtagcacctggacatgcttccgccaagcgcgcaattaaccctcactaaagggaacaaaagctggagctccaccgcggtggcggccgctctagaactagtggatcccccgggctgcaggaattcggcacgaggaagctctcactcaaggtcttgaacagcttcagcagtctcttgttgacaccatcgccggcagtcccgtcgccgacggtgttcaacagatggtggcagccatgggtaagcttggcaaccttgaaggatttgttagtcaggctgataatttgaggcaaataacccttcaccaattatgtcgattgctgacagtccgtcaagcagcacggtgttttcttgtgattggagagtattatggccgtcttagagcccttagttctctttgggcatcaagaccacgagagacattgataagtgatgataactcatgccaaacaaccacggaattgcaaatggttcaatcttctcaaaatcatttctcaagtttctgaaatacatatatatatattgtgtagtaattgaaacccggtgcaagtggatttctttgggctgctttagaaggaatggaaagagtgtcagcgtcatcaaagaattaatatctttttttttttcctttcaatcttctgctcttgtgtctcttatgttttgtataattaaatggaattcgggttttatgtgaatgaccaggaagcttctactttagcctaaaggagtagagaaaattaatgttaaacgaacaatatgacctgccagatgtagatttttttgtacccta

SEQ ID NO: 459 - DNA, 1774 bp, Glycine max
cgttcttctgcagttctgatagctagccatgttggcatgaagatttaagcgggaaaataataagacaacgtatataacgttttcacaaagtggcttttttttttattatcacaaggagtatgtgttgaatgattattgagttgcagcactgatcagttcttagaacatgaattcagcatccccgcagtttgtttccccgagaagtatgagtgtgtacgacccgatccaccagattagtatgtggggagaaggcttcaaaagtaatggaaatttaagtgcagccatgcctttaattgatgaggcagacatgaagtttgatagtcagtcagaggatgcttctcatggtatactgggagaacctaataagtatgaccaagaagctagcaaacctactgataagatacaaagacgtcttgcacaaaatcgagaggctgctcgtaagagccgattgaggaaaaaggcctatgtgcagcagttagaatcaagtcgtttgaagttgatgcagttggagcaagaacttgaacgtgcaagacagcagggaatgtatataggtggtgggttggattctaatcatctgggttttgctggatcagtaaattcaggaattacaacctttgagatggagtatggacactgggtgaatgagcaaaatagacaaatcacagaactgagaaatgctttaaatgctcatattggtgacgtagagctcaggattttagtagatggtatgatgagccactatgccgaaatgtttcgcatgaaatctgctgctgcaaaagcagatgttttctatgttatgtccggtatgtggaaaacaacagctgaaagattttccctgtggattggaggctttcacccctcggagcttctaaaggttcttggtcccctgattgaacccctgacggagcaacagcgtttgaatatctataaccttggacaatcatgtcagcaagcagaagatgccctttcacaaggtatggacaaactccgccaaacacttgctgatagtgtagcagctgggcagttcatggaaggaacgtatattccacagatgacttctgcaatggagaagttggaagatctggtgagctttgtgaaacaggctgaccatcttcggcaagaaaccttggagcaaatgtctcgaatacttacaatccgtcaggcggctcgatgcttgcttgctttgggggaatatttccaacgcctgagggctttgagctcactgtggtctaatagaccccgggaacctgcttagtctcacaacaagattacaagagcgcaaactcataacatgaacgtgatgtgatgatgaatatgggtcagtttctttggcaaagagcatcaaaaccatgtgtcatgagaggtccaggttgctcacatttttcctgcagttttgcgttatggagaagttgtaaatatgactgctagctcattttatgcatacgggcttgtaaataaattgattttggacgcatggtgtatatcggattgttgcaaaaaatgaaatatttagaatctgccatgagtctgtgtggaagttggtcatgtaaaattcatataatgttatgttgggtgttttggaaaatgaatcaactctagactctcttagtggacgtaatttattttttgtgattgctaagagtagtttattaaaaatatcagttgttattagtttgttagaaagttgttaactctaataggctctatatttagagcattcatacagtcttattgtatctttattcaatcaactacaaaatgattttcttatgat

SEQ ID NO: 460 - DNA, 761 bp, Glycine max
cggaatgactgctacgctaagcagcgcgcgtaatacgactcactatagggcgaattgggtaccgggccccccctcgagttttttttttttttttttgttcatcaagccttgttaattgctacatcttaatttccctccttctcatcctcacaaataaataaaaacaaaataaaatataaacaaaactgttcataaactcaaaaacacttttcgaaagctagctaagtagaactacgcacggagggtcttttcttcctctcctagacaccaatttatatttatctaaataattagctctacatttcataagatgacgaagttgtcaccatggtttataaataaattgcaaaattaaaagaaattaagcaagggaaccaattatcaaaattattagctaggcttgttctttgccatcccaatctggtcttcctaatgtgaattccaagcttgggatcttgcactccaaattagaacctggcatgttgctcttgagttggattgaatcacactcctgaatttgatgccctcctgatattgtttgtgaatggaggataggtgatctgagaccatctatgtcgttagaactaggtcttagccgtgactccccacaacttgaagaataactccatagagtaatggtggtggaagagtagaccatgttttgttgtgccgccccactccgccgccctcttggtgtggaaatatgcagagaccaccacaatcttggtgccaattcttcagcccgggggaccactagttct

SEQ ID NO: 461 - DNA, 740 bp, Glycine max
  misc_feature (7)..(8): n is a, c, g, or t
  misc_feature (421)..(423): n is a, c, g, or t
  misc_feature (495)..(497): n is a, c, g, or t
  misc_feature (634)..(638): n is a, c, g, or t
  misc_feature (646)..(648): n is a, c, g, or t
  misc_feature (701)..(704): n is a, c, g, or t
  misc_feature (721)..(723): n is a, c, g, or t
  misc_feature (725)..(725): n is a, c, g, or t
  misc_feature (727)..(729): n is a, c, g, or t
  misc_feature (731)..(731): n is a, c, g, or t
cctaaannaagttatgtatacggacaaatatgtaggaacctctagggaaaagtagagaaaaagaaggaaaagaattaaaaaggagggaacaaaggccttattatacatctggttccttcttttcttcaacttttactttaactacaacatttatataatgactaacacaacctataataagctttggcccaaaaagaatatacagagatgcttttagatttgtggaaaagtgcagacatctttgtcttgacaaaagcactacctatatattaatttatatacctgtgcatattaatcttttctattaatttggctagtaataaagtgatcatatatgtaaaccaattaaaattaggcatgttcactgttgtgccaatttgatctccctaaggtgaactccaagcttggattttgatccttnnngaagattcttgtttgtatatagctgctaccctcagaaagtttcccagtatgctgagatgataagatttcttnnngactaagctcatccaaatctcttgagttagcttgtatccgtgctcctctagcgctcgaagaagaattaacccatagattgcttgaagtgtagcccatatcattatctatagatgcatttgaagttcctctctgattnnnnnaaaaactnnnattttgatcatttggtactgttaaggacatgaaatcttcatccccatctgaannnnctgcaggtttgtcagtnnncntnnnantccgataca

SEQ ID NO: 462 - DNA, 824 bp, Glycine max
  misc_feature (1)..(3): n is a, c, g, or t
  misc_feature (824)..(824): n is a, c, g, or t
nnnttgggaagcaagcgcgcgctttaccctctacattaaggggaacaaaagctggagctccaccgcgggggcggccgttctagaactagtggatcccccgggctgcaggaacaagggcatgagttcaaatcaaatagggtcagtaacagtaccacctatgtttgatacaaacaagagaccgagactagagcttcccacagcaaaaaagccattacaaatctttgtcagaacacaccccaaggatgatagtttgatagtaaaagatggctatcagtggaggaagtatgggcagaaggttaccaaagacaatgcttcaccaagagcttatttcaggtgctccatggctcccatgtgcccagtcaaaaagaaggtgcaaagatgcttacattataagtcaatcgttgttgcaacttatgatggagagcacaaccatgcggccattcatgagtcatcttcatccacatctaaaggctcatcaccagtggttaataacttacctctgatgacaagcatattaaatgacaaagaacccatgaacattggcttggctctttcaaggtggtctcaaacagatcataggagacattgtgaagatgccatgcaacagaataataataatggtggtagcaacatcacaattgaagaatatgtaagttctctaatagaaaatcctgactttctcatgtcattagctggaggcaggtgggcgcacaatcgctggccagcaagagcgacacgatgtataccgttaatttgcatctttcgtgagagtgagatcgatcattcgttacctacgagcaagtagtgatgatgtaatgatgagn

SEQ ID NO: 463 - DNA, 701 bp, Glycine max
  misc_feature (693)..(695): n is a, c, g, or t
ccccaccagcaattagaacagccaatgtccacccaaacatgcagagatgagacccatctaaatatgggactaattaatttcttcagggggcatcagagagttcccatgacaaaaagaaatgaaagaattttatgatgtggaaaaggataattttaattcggagtctcatatcaaaactcacgcagtatagaaggcaaagctaaaccttcaataaaaactccaacagcctcttatcgttgaccctctttttttatgtatcatcatcatgtagtattattatgtagtggtaaaactcctcccatgtatacttttatctgcaaaattcatggtggagagtagtatcctatacatcaacttttcctgctttgtgcatatgacttttccaactaaaactctcggatcttgcatcttcatcatcttccatgctgtcaccttcagttggggatgttcctccccgggaccctgcagccaaatgaagaggactctgaggagaacctgaccctgaactgctaacttttgaagagtcattgtactgatcttgagacatccacaaacctccaagaaccacaactggctggttagaacttgcagctggaactctccgcgtatgaagacgatatttttgtaaatggctcttcacttcatcgttagtcaggccatcaacttgcataagctctctaatttgctttggtnnngctact

SEQ ID NO: 464 - DNA, 808 bp, Glycine max
  misc_feature (170)..(170): n is a, c, g, or t
  misc_feature (799)..(799): n is a, c, g, or t
  misc_feature (808)..(808): n is a, c, g, or t
ctgatcagctatgaccatgattacgccaagcgcgcaattaaccctcactaaagggaacaaaagctggagctccaccgcggtggcggccgctctagaactagtggatcccccgggctgcaggaattcggcacgaggacaaatagagaaagaaagaaagaaagaaagaaagnagatcaaattgttggagaaacgcgaattaatccagaaatcaaagaaagcgttacttgacgttcgtttgaacatcgaaaacattaacacaaatggcaacacgaactggtcgcttgtttcaaaaccaaaacctcaatgtccacgttaatggaggaggagctgtttctgggaaggctgatttaaccggacagaggaaagttggggctgggggaagaaaaccacttggagatctatccaatgcagggaacctcatcaaccaatttgatggaaagaaagcccttgacggttgattgaacacaggcaaaccctcagcctctgttagtcaggcaccgaaattgcacaagtcaaagaatcttgaaagtgacaaaagaattccagcttctgagaaattactcactcgtggcaggaaagtactttctgacatttcaaactcttggaagccaccagttcctgagataaaaaataagaagactcttgaaccaatagaggagtctcttccgtcagtgccattgccgaagtacaagtcttgccgaatcttagaagtgcatttcatcacagtttgaaccctgcagatgtgatcattttttcagactgttggaactgacgatgattcagatgatccatgggaatntcctttgtn

SEQ ID NO: 465 - DNA, 813 bp, Glycine max
  misc_feature (18)..(18): n is a, c, g, or t
  misc_feature (25)..(25): n is a, c, g, or t
  misc_feature (27)..(27): n is a, c, g, or t
cccctgcatcaaaccccnttaggcnancaattcttgggttgaccctcactaacgggaacaaaagctggagcttcaccgcggtggtggccgctctagaactagtggatcccccgggctgcaggaattcggcacgaggcaaaaattgcacaacatttgccaggcagaacagacaatgaaatcaagaactattggagaactaggattcagaaacaagcaagacatttgaaaatttacactgacagcagagagtttcaagaacttgttaggcgtttctggatgcctagattgcttcagaaagcaaaagaatcatcttcttcaaacatgtcaattcaaaaccaggcaattcctatgccttttgattatgtttctcagcatttaactgttgggaccatacctccttggcagggaccttgtatgaatgaagctggtcccacttacatggaccaacatgagcagaactcatactcggaacacaacaatggttcatgcatctccttgtttgagttcagcaaatataccaaaagtgcctcatcatatgtggacacaccatcatcaccgcaattcatgccttgaataccaatgactttggcacctttacatatgaaggctataatgtagacagacatgtttatgagatggcgtacttcagtatgactactacatgggtggctgtagatgctcaataaccacatgattgattgccacatgcgtggcaagcatataggtacacgactatatcgcatgtagtatggtgaacattgatgacgcggcgcgatgctacgagtaaccagaactacattatacggcttaggc

SEQ ID NO: 466 - DNA, 127 bp, Glycine max
gcaaactacttgaggcccgatataaagagagggagattctcattcgaagaagaagaagccatcattcagttacacagtgttttgggaaacaagtagtctacaattgctgctaacttgccaggaagaa

SEQ ID NO: 467 - DNA, 736 bp, Glycine max
  misc_feature (1)..(1): n is a, c, g, or t
  misc_feature (15)..(15): n is a, c, g, or t
  misc_feature (736)..(736): n is a, c, g, or t
natgagaagctaganagacactgccagcgcgcaattaaccctcactaaagggaacaaaagctggagctccaccgcggtggcggccgctctagaactagtggatcccccgggctgcaggaattcggcacgaggagaaggcgattccgctgaagaaaaggagagggaacttcgaggagaataataagaataatgctgctactcatagcaagaagatgaaggcgaagatgaagacgaagatgaacaagaaatgttcgacgcgcaacaaggaggatagcatgggagaggaattagacgaggaagatgaagaagagaagaaggtagaagaaacaaaagcggaagtgaatattgtgagtaaaaagagagcaaggggtagtgcactcatggaaggttctaggtgcagtcgtgtgaatgggagagggtggaggtgctgccaacaaacgctggttggttactcgctgtgtgagcatcacttggggaagggaaggctcagaagcatgatcagtgttagaagccgttccattgcttcaactgcaccaaaggaggtgcacgtgcaccacttgcctgacccatcttcttcttcttttctcctcctccttctttgtgttctcttgatcatgagaaagaaatagagtgtgttagtgatgctgagcgcctttgggatgaggagaagaagccagatattattattgcgaacacgaggatggaagcttgctgtggggagagcgccgctccttan

SEQ ID NO: 468 - DNA, 736 bp, Glycine max
  misc_feature (42)..(42): n is a, c, g, or t
  misc_feature (48)..(49): n is a, c, g, or t
  misc_feature (56)..(58): n is a, c, g, or t
  misc_feature (87)..(87): n is a, c, g, or t
  misc_feature (93)..(93): n is a, c, g, or t
  misc_feature (97)..(98): n is a, c, g, or t
  misc_feature (100)..(100): n is a, c, g, or t
  misc_feature (104)..(104): n is a, c, g, or t
  misc_feature (110)..(111): n is a, c, g, or t
  misc_feature (137)..(137): n is a, c, g, or t
  misc_feature (477)..(477): n is a, c, g, or t
cgccgtcccagaggatgagtgcgaggggtatctccccaagcncccgcnncagcccnnnaaaaaaaaaaatatgttcctggaaagctnatgaanacgnnanttgntccaanncgcgcaattaacccctcactaaaggnaacaaaagctggtagctccaccgcggtggcggccgctctagaactagtggatcccccgggctgcaggaattcggcacgagggtagtactcatcaacggagagagaaaataaaaattaaaagtaaaatcccagagtgagagagagaaaagaaaagaagagaataaaacaccaaacaagcttcgaaacgatcgtgagtgagatgaagaagtgcgaactgtgtaaagttccggcgaggatcttctgcgagtcggaccaggctagcttatgctgggactgcgacgctaaggttcacagcgccaacttcttggtcgtgaggcacgtgcgaaccctactctgccgnacgtgtcgttctcccacgccctgtaaggccttcggcgcctcactcgcccacgccgtccccgtctgccaccgctgcgccgccgcggaagataccgacgatagcgaagccggcaatgacgacgaaccagacacctaggacgacgaccatgtgcacaaccaggtcatgccgtggtcctccacgccgacgtcgtcgtccgcctctagctcctcccgcagtcaacgcccccaatggaaaaacacttccgcctcctcctctcacg

SEQ ID NO: 469 - DNA, 893 bp, Glycine max
  misc_feature (1)..(1): n is a, c, g, or t
  misc_feature (71)..(71): n is a, c, g, or t
  misc_feature (74)..(74): n is a, c, g, or t
  misc_feature (97)..(97): n is a, c, g, or t
  misc_feature (523)..(523): n is a, c, g, or t
  misc_feature (785)..(785): n is a, c, g, or t
  misc_feature (893)..(893): n is a, c, g, or t
naagttccaaacgatccaccaagcgtgtgtgcttgaggagtactcacggggctaagctggagctttaccgnggnggcggcttttctagaactagtgnatcccccgggctgcaggaattcggcgcgagctatagtgagcaattcactttagagaacaataagcaatctcagttgtcgatattatgtgcacatgcatattgaaatatcgagttttattttcattaacgattgaaattacttacttatcctctgaagtgaatctcatttttgaggcgctaaatttcttgttcctcggtacccttgtaatcaagaaaacaccgacaatttctggcttctttccagtttttctagtgaagcacaggcaggcttctctagaactacggatatagaaaaaggccatagttattattgtgcagcagctgattgcatcgtgggtgaaagaaaagtttctcatgtaaagggttttgttatgcatctggtttgactatgtgcttatatcaaatctataagcatatgagacattnttaatgtattgctccttttttcttttttggtcaattattttagctaaacggttctatttccaaattcgtacacctattgtgacttgaaagactatagttagctatcatactatctacagttctcctgcattatcatacagaaaataataattaaactcgaggggtgtccggtacccaattcgcctatagtgagttgattacgcgcgccactggcgtcgtttacacgtctgactgtgaaccctgccgtacctacttatcgctngcagccatcttcttcgcagctgcgtaaagcaaaaggccgcaccgtcgcctttctacattggcacctgattgcaatggacgcgcctgacgcgattaacccgccatttgn

SEQ ID NO: 470 - DNA, 802 bp, Glycine max
  misc_feature (15)..(40): n is a, c, g, or t
  misc_feature (49)..(49): n is a, c, g, or t
  misc_feature (58)..(58): n is a, c, g, or t
  misc_feature (736)..(736): n is a, c, g, or t
  misc_feature (785)..(785): n is a, c, g, or t
gaggggggtaataannnnnnnnnnnnnnnnnnnnnnnnnnaaggggggngggtgtggnaaaaacgacctgccatttcctgccaagcgcgcaattaaccctcactaaagggaacaaaagctggagctccaccgcggtggcggccgctctagaactagtggatcccccgggctgcaggaattcggcacgagatgaagtctaattctctgaagtcgtcagactttgatcaagaaaaccaatctccaaaatcagtattatcaggagttggttcagacagccttggctcctctgattcagacacaccaaatggaagtttgtcgcccatgtcatccattagtggcttccatacaagcagttttacacgtgccaaacccaaaacaacaacatctgaggaagaagctgggatggacactgattcaactcatgatgagaaacctcttatgaaattcaagcttcctccaaatggatgtgtttccatcaaagaagacaacacagcagaagaatcttccggtcggactttcaaactctttggaatgactctatttgtaacagacacctgcaaaccatctccaacaatcgaggaatgctaaagatacctctaaacattcgcgcgcaacgcctttcctcctccatggaggatggcaaattggaacttgttggacactctagagcaagtgaaacatcagcaatatccaagctaaaggtgagagtggaacctgaagcatgtgggaaagggtntgtgccatataaaagatgcatatctgttgtgacagctgatgatagagcngagcaatgtattcatct

SEQ ID NO: 471 - DNA, 764 bp, Glycine max
  misc_feature (1)..(2): n is a, c, g, or t
  misc_feature (764)..(764): n is a, c, g, or t
nnaagagagacacaatgacatgcatcacgccagcgcgcaattaaccctcactaaagggaacaaaagctggagctccaccgcggtggcggccgctctagaactagtggatcccccgggctgcaggcttccccacaatactccatttatgccactgcacaaggagccaaaagggaagcatctatattctaatcttggagagtttgaacataaagaagttcaaaaggaaggatcatggactggttcaaacactagttcaattgatgatggagataacactgaaaaatcagatgatcaagccaaaagtcatgtacatggttttagcaaaagtgaaactttaactatatctgagctaagggtgaggcctaaaacatgtggaaaagggtttgtaccatataaaaggtgcatggcagagagggaaaaccagtgctcatcagtatattatgaggaaagggaagagcaacgtattaagctttccttatagtaccctcttattggcttttcttcaaagcaggttcccttttacaggtataatgtacctgtttctgttgctggatgaccttgcatgagaagaaagataacggagctgaaatttttgatatctctactgcatatgtaattctacacaagcctgtgtgttaacctatatgaacttgcagactttgggaaaacactatccaatgaattatcgcacctatctgtatttctttcatgcctagccctttggattgcttcaaatacttcctcagcctccactcggatatatn

SEQ ID NO: 472 - DNA, 893 bp, Glycine max
  misc_feature (651)..(651): n is a, c, g, or t
  misc_feature (671)..(671): n is a, c, g, or t
  misc_feature (677)..(677): n is a, c, g, or t
  misc_feature (694)..(694): n is a, c, g, or t
  misc_feature (706)..(706): n is a, c, g, or t
  misc_feature (711)..(711): n is a, c, g, or t
  misc_feature (722)..(722): n is a, c, g, or t
  misc_feature (724)..(724): n is a, c, g, or t
  misc_feature (730)..(730): n is a, c, g, or t
  misc_feature (736)..(736): n is a, c, g, or t
  misc_feature (781)..(781): n is a, c, g, or t
  misc_feature (783)..(783): n is a, c, g, or t
  misc_feature (805)..(805): n is a, c, g, or t
  misc_feature (815)..(815): n is a, c, g, or t
  misc_feature (817)..(817): n is a, c, g, or t
  misc_feature (819)..(819): n is a, c, g, or t
  misc_feature (821)..(821): n is a, c, g, or t
  misc_feature (834)..(834): n is a, c, g, or t
  misc_feature (871)..(871): n is a, c, g, or t
  misc_feature (890)..(890): n is a, c, g, or t
ttcggcacgagctctgctcccttaattaattagccaccatgctctccgccctcactccttccgaccccttctctcccttctcccccttctccgccggcttcacgccgtgggatgacaacgacgattcccacgccctcttctcccccaaaccggtctctgcttctagctccgcctctgactataaatccgaaccgaacccaaccgaacacgtatgcgcctcgtcctcggtgatgatggacgagcggaaacggcgccgcatgatatcgaaccgggaatcggcccgcaggtccaggatgcggaaacagagacacctggagaatcttcggaaaccagttgaacaagtgcagggtcgaaaaccgggaaactcggtaaccggttgcagttcttcctgcaccacctgaaccgcctccgaaccgaaaacgaatggctccgctccgagcgaacctgctacgccaaaaagtcgccaatttaacacaaattttgattttccaacaattccaaaccaccttctcccctgctgcatggaacacatgcaccaacaacaacaccacctcgctcatgaaaattaatcaagtttaattaattaaataatatatatatatatatatatatatatatatatatatatatatatatatatatataaaatanggtcttggtaaaaatctaanaggccnagggtgtcctatgttantatcattaaaantttanataaagaaatntnttctanatggtnagggtgggattttggaaaaatattaggctggttttgggaaaatantnatttcattttttccaaaccatnggggtttttntntntnaccgaatataatnttttgttttaaaaaatacttttctttttttgtttccnaaaaaaaaaaaaaaaaaantcg

SEQ ID NO: 473 - DNA, 838 bp, Glycine max
  misc_feature (5)..(5): n is a, c, g, or t
  misc_feature (45)..(45): n is a, c, g, or t
ctttncttcccccccccccccccgccctcggggacgatcgagganatgcttcggccaagcgcgctattaaccctcactaaagggaacaaaagctggagctccaccgcggtggcggccgctctagaactagtggatcccccgggctgcaggaattcggcacgaggctgccagatacaaaccagagccatcagaaggaacgtctgagaaaaaggtgactccaatggaagaaatgaaatctctagacttgaaaacgagtaaggggatcactgaagcattacgtttacagatggaactccagaagcgacttcacgaacaacttgagatccaaagaaagttgcagattcaaattgaagaccaagggaaacgtcttcagatgatgtttgagaaacagagagagatgggtgacagcaaggttaacgtctccttggacgagccttctgctgctgcaccatcagaaacagtagaaaccacaaatgaggaacgccacaaatttgaaagcattccaaaagccatacccgaagagaaggagtcaagcacaacaaaacaaattgcaggtgaagctgaagaaatgatcaaggaagatgaagttgcaccagccacaaaacgggtgaaaagttcgtaacagcaggatcgttgttttatgccttctagatttgtttaatattcttagactggtttggactccatggaacttgtagaaatattattggatccaaggatgtttcaacttgctcatgtatcacagccatttcctatggagatatggcatgagtgccacaagtaatgttggctcattgtgatggaaatttgttaccatgcctctagtgggtcctggagg

SEQ ID NO: 474 - DNA, 638 bp, Glycine max
actctaccaaggtggatttctaacggcaaaactaacatcagcctttcaagtaaccgaggccatatcttttgctaaatgtacattgtactcattcattgaccacaattggacaggagggactcataagttacgagctcgaccaatcattcagcctaatctttcttaaaatgaaatctttcatgattcagtattgtcttgtagtatcactattgatactgtaattcagcagattcatatagcttaattactcagttctttgacgctttggggcttgagcactatcttcactagctatagcatgttgagttttgggagaatcaggcttcccacacttttccaatgagccttcctcaactctggtactgccattaacctgatcaggtcctgacctgcaatggtccagtactagtgatgcttccatttcatttttggaaagggaatctttcgtagcatttgaagacatcccaaatggagtctcaatggtggtaaatgatggtgccttgaacgtttcagttccaggtttacattgcttctcaaacatcatctggaggcatctaccttgttcttctattcgcaactgtaggtttctttgaatctcaagctgttcatgcaaccgcttctgaacctccatttgtaat

SEQ ID NO: 475 - DNA, 749 bp, Glycine max
gatgaccactgcaacgagcgcgcgtaatacgactcactatagggcgaattgggtaccgggccccccctcgagttttttttttttttttttttaaaaaaaacaataaacaaaccagtagtactacaaagtatattaaagataagaacatcatctacttgactcgagtctctaagaagcacaaattaacaaaaccatcctaataactaaccttgctagctagctagctatgcttgcaagaaaaaccgtgagaaattaattaacatagtacttaattcgcaagtcagtgagagattaaagacatgatcatattggcaagggtgatcagaaggaaggaggagggcgaggtggagctccccagaacacatcatgaggcatgttctgaccattgtgtagcaaattaggaggcaaattatacataggcattgaaacctgttcccccaaaccttgagattgttgttgctgctgctgctgctgctgctgttgctgctgctgctgctgctgctgcacttgcatttcctcctcaccttgatcatcctccagaggcaacctctcataagtggcattagcgaaagtggcggcgatcaccatcaccggtccggaggcgacgagagagcccgccacgttgccgccgacaacctgcccctgcccgccggctaggtagacggtcagtcggtggcgccggacgggcgaggggacggcaaaaaggcacccgaaagggagatatctcgaacctcccgtgggaggtatga

SEQ ID NO: 476 - DNA, 818 bp, Medicago truncatula
ggtagagagagaactagtctcattgcttccacaaacggtagactttagatccaaaataccactactctttcctccaaaacatggcttcaaccaccaaagactcagatttggaatatttggaacacattcaacaataccttctttttgatgattctagcatgctgaaatctcatcaaccttttccaagccctaaaagtgacaatgatttagacacaactgtagaggcgcgtgaagtaagcatgcctcctgtatggaagcggtacaagggagtgaggcgtaggccatgggggaagttcgcagctgagataagagatccaaaaaagaatggtgctagagtttggcttggaacgtatgtgactgaggaggaagcagctttggcttacgacaaagctgcttttaagatgcgaggccgaaaggccaagcttaattttccccacctcattggctctgatgtgtctacatctgagccagagaggggaggtggttttgaaaagggaatcacccgagccttcttcttcttcatcggagggaagttgtgagtcagtgtaccagggttgaagaggaggaggggcatggttgacctacttaacaaattagccaagaatagaagccaagtagccaccgggtggttggcgttgaaaaggcctcacaagcaaatgattttgagcagtgggtgaatgagttgaatgattgcactctaatctagagctcatagtgtaggtgcatttattttattttttcttctaatttgggcagtttcctaatatttttttcatcacccttttgatattaatcaaaggcgtgatgttaagcaaaac

SEQ ID NO: 477 - DNA, 707 bp, Medicago truncatula
  misc_feature (667)..(667): n is a, c, g, or t
ggattcagttacaatggtggttctattagtcaaagtgtttcagtttcatcaatggatgttggtgttgtaccagaatcaaccatgacctattcaagacctccaaaaggaacaattgacctattttcaggtccttctattcaaatgtcttcccatttctctccaatggatagagaagcaagagtcttaaggtacagagagaaaaagaagacaagaaaatttgagaaaacaattaggtatgcttcaaggaaagcctatgcagaaactcgaccgcgtataaaaggtcgattcgcgaagagaacagatgtagaagctgaagttgatcaaatgttttccacatcactaattacagaagttggatatggaattgttccctctttctgaaatgatacaaaacaaaatggtcaggggacaaagtgcacatttgaattgacggtgagtttgacataatcacctcgtatcaccgtcaattttgtataagctacatttttggagcttcaacaaaattactgtaattttgtcaaacagaccgtgctttcaaatatacactaaggagaaggttgagaaacatgaccaacagaaaattgcaaccatgttttactattaccaagtctttctactaatactgtatttttgatataatattattatttgcagttgcactaattanatatatgctttattatcttgttggtggcttttgatgcgac

SEQ ID NO: 478 - DNA, 776 bp, Medicago truncatula
caaatcacactgaatgcttagagagagaaagaaaaatttagagagagaaaaaacttgataatggaagttgttgcagggatgaaaaaggaggaaaagatggtgtttgatgaaactgaactgaggttaggacttggattgccagggaaaacaacagaagtagtaaggaagagaggtttttctgaaactgagagtgaaagtgaaacaaacactgtggatttgaagcttaatctttctactaaggaaggagcaacagatccacaatttaagccaaaggagaaggctcttctgctctctgattctggtgccaagcctcctgctaaggcacaagtggtagggtggccaccagtgcggtcattccgtaagaacatgtttgctgcccaaaagagcaatgaaggatcagaagaaagtgaaaagaagaatagcaataataatccaataagctttgtgaaagttagcatggatggagcaccttacctccgtaaagtagacctcaagatgtacaagagttacccagagctctctgatgccttggccaaaatgtttaactcctttaccacaggaaattgtgaatcccaaggcattaaggatttcatgaatgagagtaataagttgatggatctattgaacagctccgactatgtcccaacttatgaaagacaagatggcgactggatgcttgtcggtgatgtaccatgggagatgtttattgattcatgccagcgtctacgtatcatgaaaggaaagggaagccattggactcgcaccaagagccatgg

SEQ ID NO: 479 - DNA, 525 bp, Medicago truncatula
aactgtgaatctcaaggaatgaaggatttcatgaatgagagtaagttgatggatcttttaaacaattctgattatgttccaacctatgaagacaaggatggtgactggatgcttgtcggtgacgtcccatgggagatgtttgttgaatcatgcaaacgtttgcgtatcatgaaaggaaaggaggctattggtatagcaccaagagctatggaaaaatgcaagaacaggagctagacttgctggtcgcacttgttcgccacctgctccatcttttgtcatattttggtacctgcaggatgttcagtatagttaatttgtgtaatgttatatggtttttattttttgataaaattgttatatggtttgttatacatatataatgtttgaaacaaaatacaatgagagtcttaagtgctgattactttaaacagaaacaataaacgactcccaaattatgttgttagatttggctttcttatatattatctatgatttcctatttaaaaaaaaaaaaaaaaaaaaaaa

SEQ ID NO: 480 - DNA, 836 bp, Medicago truncatula
  misc_feature (380)..(380): n is a, c, g, or t
  misc_feature (489)..(489): n is a, c, g, or t
  misc_feature (564)..(564): n is a, c, g, or t
  misc_feature (583)..(583): n is a, c, g, or t
  misc_feature (594)..(594): n is a, c, g, or t
  misc_feature (630)..(630): n is a, c, g, or t
  misc_feature (632)..(632): n is a, c, g, or t
  misc_feature (646)..(646): n is a, c, g, or t
  misc_feature (652)..(652): n is a, c, g, or t
  misc_feature (657)..(657): n is a, c, g, or t
  misc_feature (676)..(676): n is a, c, g, or t
  misc_feature (682)..(682): n is a, c, g, or t
  misc_feature (691)..(692): n is a, c, g, or t
  misc_feature (696)..(696): n is a, c, g, or t
  misc_feature (699)..(699): n is a, c, g, or t
  misc_feature (707)..(707): n is a, c, g, or t
  misc_feature (738)..(738): n is a, c, g, or t
  misc_feature (747)..(747): n is a, c, g, or t
  misc_feature (751)..(751): n is a, c, g, or t
  misc_feature (756)..(757): n is a, c, g, or t
  misc_feature (759)..(759): n is a, c, g, or t
  misc_feature (765)..(767): n is a, c, g, or t
  misc_feature (769)..(770): n is a, c, g, or t
  misc_feature (786)..(786): n is a, c, g, or t
  misc_feature (788)..(789): n is a, c, g, or t
  misc_feature (803)..(803): n is a, c, g, or t
  misc_feature (817)..(819): n is a, c, g, or t
  misc_feature (822)..(822): n is a, c, g, or t
  misc_feature (832)..(832): n is a, c, g, or t
  misc_feature (835)..(835): n is a, c, g, or t
tgattaccgccaagcctcgaaattaaccctcactaaagggaacaaaagctggagctccaccgcggtggcggccgctctagaactagtggatcccccgggctgcaggtcgagtttttttttttttttttttggaagcaatcacataataataataattaaacaaggcaaacctacaatagtatataggtggttaagtttattgcttcttgtcgattacaaatacttaaaattaaagtttgaatctatatacgaacaaaacaaaaacagtgaagacacatccaaactaacactccaatccacaggtagtgcttcatatatcttttcatataggtccactttggtacgggacttcgatataggaggatatgatatgtatttanaccaaattcagcttcggtttttgcatttctccattgctcttggtgcaagtccaatagcttctgatcctttcattatgcgaagacgcttgcatgatccaacaaacatctnccatgggacatctcccacgagcattcagtcgccatccttatcttcataggttggcacatactcagagctgttaanaagatccatcaacttgcgncccttcccaanagttgcgcaaccctgaatggcgaatggcaaattgtnancgttaatattttgntaaaantcgcntttaaatttttgttaaaancaactnattttttanncaantangccgaaancggcaaaatccccttataaatttaaaagaanaaaccgaanatanggtcnnantgttcnnncnnctttggaaccaagaancnnctattaaaaaaacncggactccaaccgnnnaangggcgaaaanccnt

SEQ ID NO: 481 - DNA, 460 bp, Medicago truncatula
ccgctaagtataacccaaactacctttgttcgaacaatcaaagccattccatgacaattacaatggacaatattattagtaacaaagataacataaatgcttgttgtttccaatcccattcctagactatgtgaactctaggaaacactagtatcagccttacaaagactacaagtacaacaccaagaacacttgctaagagcaaaacttatcatgaccaaagtattgatggtggttgatatgagataattaattaatttgacagactattcactacaatcattaatctcttggacgagccaaccagagagagctgagagcgcgcagccgcgaaaagtaatcatggatggcaaggagtgcacgagccgattgtcgtgttgtcaatatccggtgcatttgttgtagtgtctgctggcgcagattgtcagcctgtcgaatgaagccctcgagtgttccagtt

SEQ ID NO: 482 - DNA, 655 bp, Medicago truncatula
tcagataagccacttgatgcaaagacattgagaacgtttagcacaaaacagggaggctgcaaggaaaagtcgtctaaggaaaaaggcttatgtgcaacaacttgagtcaagtagattaaagcttacacaattggaacaagaccttcaaagagcacgctctcagggtatgttcatggattggagtggtggtgttggaggcaatataagctctggaggtgcaatgtttgacatggaatatggaagatggttagaagaagacaaccgtttattaacggagttaagaaacggattgcaagcggcgttaacagataatgaaatgagagtaatggtggatggatatttgtgtcattatgatcaaatatttagactcaaaggtgtcactgctaaatcagacgtgtttcatcttatcaatggcatgtggacttctcaagctgaacgttgcttcctttggattggtggttttagaccttctgaaattatcatgatgttgatccaacaattggagccactagctgagcagcagataatggggatgtatggactgaggcattcttctcagcaagcagaggaagctctctcacaaggacttgaccagttgcaacagtctcttgttgacaccattgctgggagaccccttgttgatggtgttcaacaa

SEQ ID NO: 483 - DNA, 702 bp, Medicago truncatula
tagataaattatatacaaatatttgtcaagagacatatcaactgactggtcagtgatgtcttttcaatacagcacaagaaaaaacgaatatatacatacaacagtgtgcaaccacaaaccattaagcaggaaaagaaaccaagagagaggaaaccaccctcaaataagcttgatttctgaaatacaatgaacaactgtaacctaaaatacaaatactatttctacattttcccccttcaactctatctatcatacacctatataatcaaattattgagactatttttcaaagcatataaaagcttaatgaaaaatgttgtaccacaccagcagtatgtggaggagaatagaaaaatcacagtatctaatgtttacaagcaccacaactaggcttcttcttcacaacagaaattcatttcccaaaagataccagcttcatgcagaaagaacatatatatagctttgaaacagtttactcccttggtcgtgcaagccatagagaactcagagctcgcagccgggagaaataatcgcttattgcgagaagagctcgagctgattgtctggttgttaatatacgaagcatttgttgcaacgtttgctgcctcaggttatcagcctggcgaagaatccctcaagagtaccgagctttcccatggccatagccatttgtcccatgtaattcgccacatttccagaagc

SEQ ID NO: 484 - DNA, 457 bp, Medicago truncatula
gatgaaagactaagaattgcattagacggcatcattgtagttagcatggaagtatgtcgcgctcaaagtttagacagttcggttgaaaaccccttaaaaggaaagataagaattaccacaagatgcctatggcttgacaaagggaagctgttggacgcactccataaagctgctcatgcttctctttcaagctgccctgtaaactgcccactggctcacatggaaaagactgtgtctgagatgttgaggaaaatggtgaggaagtatagtggcaaacgacctgaagttattgccgtcgctatagaaaatcctggagctgttcttgctactgagataaacacgaagttatctggaaaatcctatgtaggtgggatatcaacatttagaaatgtggtgcataaagaaaatcaatccaccaaaatgcaaatgagaggagatcaaaaaaaaaaaaaaaaaa

SEQ ID NO: 485 - DNA, 309 bp, Medicago truncatula
  misc_feature (50)..(50): n is a, c, g, or t
gcctaggctactttaccgttgatcggtgttagacattctgtatgatggcngtatgtgttgccttaattgtgttgtactttgtttttatgactgtgtttgatttaagtatgtgacggtaatactgtggttgaactgaatacactcttataatttacgttaataggtcgaaacagaatagcgtactggttttgttgctcatgtctttggtgtttttactgagagcaactttacctttttctcacatttctatcaaatcatacatgattttggatggaaaaaaaaaaaaaaaaaaaaaaaaaaaaaaaaaaa

SEQ ID NO: 486 - DNA, 181 bp, Medicago truncatula
gcacgagccgtcgttcgcttgccgaccagcagtagggggccttggccccccagaggcacgtgccgttggtggacctcgtaaggcggatgagccttacgggacactttgaaacgcaatttctattgagcggcgggtagaatcctttgcagacgacttaaatactaaaaaaaaaaaaaaaaaa

SEQ ID NO: 487 - DNA, 369 bp, Medicago truncatula
ttataaggcatggagcagatgtggatgtggaggacaaggaagggtacacagtgcttggtcgaattactgatgacgagtttagatcaatattgattgatgctgccaagaccatgcttgaatgatacaaacacaagagaacgagaacaaggttttgcttaggagttaggacctgttttatgtgtatgaccattgagagcattcaatggcttgcattttcgccaaccaaccttgcatttctgtctcttttttttatagcattcttaactagtatttgaggttattttcaccaacatatacaactaacgtttatgatccctttgatttgagaatatcgtaaattttatatatatagaaaaaaaaaaaaaaaaa

SEQ ID NO: 488 - DNA, 819 bp, Hordeum vulgare
gccgtcgcctacgaccgcgccgcgtaccgcatgcgcggctcccgcgcgctcctcaacttcccgctccgcatcggctccgagatcgccgccgcccacgccgcagccgcggccgccggcgacaagcgtccgtcccccgagccggcgacctctgactcgtcctcctcgtccgggtccccgaaaaggaggaagaggggcgaggccgcggccgcgtccatggccatggcgctggtgccgccgccctcccagctgagccggccggcccaggcgtggtaccccgccgcgccggccgagcaggtggccatggcgccgcgcgtgcagcagctggtcagctaggcgaccccgctcgccagcctaacggcgctcgatcgtaaaagacaatgtgcaagtgcatggatgcgacagcaacgggagcccgcctttcactgttgcgcggtgcaaggtggcgatggcaatggagtgcgatggcgagcgagcagtgcaatcaggcaaagcgacctcagcgacggctccatttggatatctggatgggtcgaggatggaagataagcttggagcaactgctgggtgctgcaattgggcctggaatgatagatatttcccggctctctctgttagggcccaggggcatgcgactcgcccaagtgggatcaagccggaaccgggctagtttcgggggcggcggggaagcctttaggaagggagaggggatattagagagaaataaggcaggagcagtaggagaggaatagccccggggggagaggtggggggtaggagggggggggggccaggagggggagggtggatgtggggggaggg

SEQ ID NO: 489 - DNA, 1148 bp, Hordeum vulgare
cgagcggcgatgatcaaggccgagccggacctccgtggccagctgcgcggcagcgctggcgtcggcggcatgcagctgcagcagcgctgcgactcgtgccgctcggcgccgtgcgcgttctactgccgcgccgactcggcggcgctctgcgccgcgtgcgacgcggacgtgcactcggcgaacacgctggccagccgccaccgccgcgtcccgatgggcgcggtggccccggcctcccctgccggaggcgccttcgtcgtccgccccggcggcgtcaactcctcctggcccatccgcgagggccggaggtcctactacgacgaccgcgagggagaggaggaggaggcgacgtcgtggctgctgctcgatccgctccggggatcggaggcggatgcgccggcgttcggcgacgcgctcgtcgctgacttcctcgacctcggacgagcaggcgagaaggaggcgtcgagcaaggactaccacggccacgggatggagagcaacgagggcagccacgaccacgacttcgtcgtgcccggtgagccggtggcgcagctgcatgagcggcagggcttcacggcggagatggcgtacgatgcacaaaactctaaccatggctttcaatgtcatcgtcaccggacaacagcagcaccgtccaggatgtgagcagctcgtacatgaggcgcagcgagagcagcgtcgacctcttctcaacggcggcgcacacgtcgccgcagttcatgggcatggcgatggacagggaggccagggtgcaccggtacagggagaagaggaagatgaggcggttcgagaagaccatcaggtacgcgtcgcggaaggcctacgccgagaccaggccacggatcaaggggcggttcgccaagcgcgccgacgccgacctcgaggtggaccagtacttctccgcagccgcgctgtctgactccagctgcggcgtcgtgccgactttctagggcggctcggtggagagaccatgagcgttcctccttccatggtcgatcgatcgacgcctgcatgttggttggctctccttaatttgccgaatatcctaaactttactggaggcatcaaagcttcacctgtaaatactaaatacagtattatggaaagatgccagatagatcttttcttgt

SEQ ID NO: 490 - DNA, 1171 bp, Hordeum vulgare
gatgatcaaggccgagccggacctccgtggccagctgcgcggcagcgctggcgtcggcggcatgcagctgcagcagcgctgcgactcgtgccgctcggcgccgtgcgcgttctactgccgcgccgactcggcggcgctctgcgccgcgtgcgacgcggacgtgcactcggcgaacacgctggccagccgccaccgccgcgtcccgatgggcgcggtggccccggcctcccctgccggaggcgccttcgtcgtccgccccggcggcgtcaactcctcctggcccatccgcgagggccggaggtcctactacgacgaccgcgagggagaggaggaggaggcgacgtcgtggctgctgctcgatccgctccggggatcggaggcggatgcgccggcgttcggcgacgcgctcgtcgctgacttcctcgacctcggacgagcaggcgagaaggaggcgtcgagcaaggactaccacggccacgggatggagagcaacgagggcagccacgaccacgagctcgtcgtgcccggtgagccggtggcgcagctgcatgagcggcagggcttcacggcggagatggcgtacgatgcacaaaactctaaccatgggtacggatttggcgcaacattcgaacgcagcctttcaatgtcatcgtcaccggacaacagcagcaccgtccaggatgtgagcagctcgtacatgaggcgcagcgagagcagcgtcgacctcttctcaacggcggcgcacacgtcgccgcagttcatgggcatggcgatggacagggaggccagggtgcaccggtacagggagaagaggaagatgaggcggttcgagaagaccatcaggtacgcgtcgcggaaggcctacgccgagaccaggccacggatcaaggggcggttcgccaagcgcgccgacgccgacctcgaggtggaccagtacttctccgcagccgcgctgtctgactccagctgcggcgtcgtgccgactttctagggcggctcggtggagagaccatgagcgttcctccttccatggtcgatcgatcgacgcctgcatgttggttggctctccttaatttgccgaatatcctaaactttactggaggcatcaaagcttcacctgtaaatactaaatacagtattatggaaagatgccagatagatcttttcttgt

SEQ ID NO: 491 - DNA, 820 bp, Hordeum vulgare
aaccacacatcgtcttctcagagagccagagctatcagatctcgctcgcatcgcatccaaacgtacgtgcttctaaagttcttctccagcgcagcatcttcattcgcacgtcgactggaaatggaagctaccgacaacctcctcatggccaccgagctcaggctgggcctccccggcaccgacgacaagccacagaggatcaactacgtgtcgccgccggcgactcccaggggcaagaagcgcaccctggacgccttcgaggccaccgcctccgatgaggacgacaagtccgacgacgtccagaccgcaccccccgtggccaaggcacaagtcgtagggtggccgccggtgaggtcgtaccggaagagctgcttccaggcggcggcgagcaagagcaaggcgaagaaagcggacgagaccagcagcaaacccgtccgagtacgccatcacctacgaggacaaggacggcgacctcatgcttgtcggagatgttcccttcgatatgttcagcggcacatgcaagaagttgaggatcatcaagagatccgaagccacaggcctgggatccaaataatgaagatttgagaaagcagaagatattctgggctctcgaacccttttttctttttttttggccgggttataccttttggtccttcaaactggggttcgatccccccacccaaaaagggatgaagctcggtgcccttcaaaaacaccccatgggtggggggccctttgtttggggcctttggaaagagggcttttttaaaacccccaaagggaaaagtggggggaaatttggggtaaaactctcccc

SEQ ID NO: 492 - DNA, 1024 bp, Hordeum vulgare
tcagagaattgagcaccccccgggctgcaagttcgcctccccggctccgaccccgaccgcaagcgcgcctccacctccgaccccgactgcccctccccgacctccgccgccttcgactctcccccttcccccaaggcgcacgtggtgggctggccaccggttcggtccttccggaagaacgccctcgcgtccgcggcctcgtccaagaccaagttcgtcaaggtggccgtcgacggcgcgccctacctgcgcaaggtcgacctcaaggcttacgcgggctacacaagccctgcctcctacgaccagctcctcgccacgctccaggacaagttcatctcccacctaaccgtccgcaagcttggtaacgaggagatgaagctcgtggacgcgctgagcggcacggaatatgtgccaacgtacgaggacaaggacggcgactggatgctcgtcggagacgtcccctggagaaggtttgtggagacctgccagcgcatccgtctaatgaaaagctctgaggttgtcaatctaccaccaaaacctgtccgggaggcacaatccttgctcctttttctacagaccgcttcaaaagaagaaatgtcttttgctcaaggaggttctttcgcaaggttccgaagtaagaaaggggtacagccatctctacttttttgccccagaatgctattgagttccggaaagggccgttaacctggaattcccttctcccaggccagtgcagttgtttcctacaatgaaagatgggagaaaggtggagaagccctccaaaaatttaccccctacaagttcgtgtactggatgaaaaaataaccagaattgcccgtgtattccctgaggcgtgctttggttcctgggaaaaatagcgcttacgccgatgagaaaataaaaataatatacaacgccccggagagggggggcgagagatcaccatcatttagacccgtttatgtgaacatggatttacgaatccgccgggacgccgcggcgtgttcaacctaatagaagacct

SEQ ID NO: 493 - DNA, 961 bp, Hordeum vulgare
  misc_feature (140)..(140): n is a, c, g, or t
  misc_feature (143)..(143): n is a, c, g, or t
tttagtagtatgtatcatagttgcgcgtcatattgaatagagtgttgttgttctttattatctctgtcaatactatcttaattctaggagtgatatattatatatccgttaaggagtttcgggtttgttaaggggtgggntantgatattggagatcgtatttaagttttgtattctaagctggagctcaaccgcagtggcgttctggtctatattaaactaatggatccccctggctgaatgaattggcacgagggcctccggtccggtcgttccggaagaacatcctggcggagaagtcgtcgccggcggctgcggcgttcgtcaaggtgagcatggacggcgcgccttacctgcgcaaggtggacctcagcatgtacaagacctaccaggacctctccaaggccctcgagaagatgttcagctccttcaccatcggaaactgtggaacttaagggatgaacggcatgaacgagagcaagctgatggatctgctcaacggatccgagtacgttccaacgtacgaggacaaggacggcgactggatgctcgtcggggacgtcccgtgggaaatgttcgttgagtcatgcaagcgccttcggataatgaaaggatcagaagctattggccttgcaccaaggcgatggaaaaatgcaagaacaggaactatgggaagatgtactaaatgtttgcaagaatcaaatactataaccttgttgctaccctgatcaattctttggctaatctagtctgatctctgatagtgaatatttggttgtgactttctttcagtattagtccaatctatttgtatttctagaagagacccaacattgaatgtatttactgttgccataatgggtttttttttaaaaaaaaataaaaaaatcttagggggggccgtaccaatttccctattggaactgttttaacctcttaattgcccttatttaaaaatctc

SEQ ID NO: 494 - DNA, 921 bp, Hordeum vulgare
  misc_feature (8)..(8): n is a, c, g, or t
tgtagacngcgcgtaggaaccccactaaagggaacaaaagctggagctccaccgcggtggcggccgctctagaactagtggatcccccgggctgcatgaattcggcacgaggccgggaagaggggctatgaggacaccattgacttgaagctgacgctgcccaccggcggcatgcaggaagactccgccggcaagccggagccggcagccgacaaggccaagaggccggcagaggccgcggccgctgaccccgagaagccacctgctcccaaggcacaggctgtgggttggccaccagtccggtcgtaccgcaggaacgccatgaccgtccaatcggtgaagatcaagaaggaggaggagaccgagaagcagcagcctgctgctaccgctgctgctggcgccaacggctccaactttgtcaaggtgagcatggacggcgcgccctacctgcgcaaggtggatctcaagatgtacaacacctataaggacctctccattgctctgcacaagatgttcagcaccttcaccgcaactgggaatgaggggaagatggttgaggcagtgaacggttcagatgttgttactacttacgaagacaaggatggcgactggatgcttgttggagacgtcccatgggagatgtttgttgcttcatgcaaacgcttgatgatcatgaatggttccgaagccatcggtcttgcaccaagggccaaggacaagtacaagaacaagagcttaacatggggcagttagaggaagactatgatgccataaaggatggtgggttttggcaatgtggctggggggttcttaaaaaatataaaagggttttcaacccccacccccggccttacagacacggccaccccttgccccctgtcaaacatcgggtgggcggggacccaaaagccaaaaattttc

SEQ ID NO: 495 - DNA, 626 bp, Hordeum vulgare
cggacgaggccacctcagcaatcttccagcaggcagaggatgcactgtcacaagggatggaagcattgcagcaatcactggcagagactttggctggatctctgggttcctcctctggttcttcagggaatgttgcaaactacatgggtcagatggccatggccatgggcaagcttggaacactcgagaactttcttcgccaggctgacaacctgcgacagcagaccttgcatcaaatgcagcgaatcttgacgatccgtcaggcctcccgtgcccttctagctatacatgactacttctcgcgtttgcgcgcgctgagctctctgtggcttgctaggcccagggaataaccaaggatcgctcgctcgccggatttcccccaagctgatctgtacaacgctgggggctctcttcatattgctgcagataatttgggtattcgagtttttctttcttgtataattatgtgtagctgctttttgggtccagggtttgttgtactcgggtggtatacaagtaggtggggggagcctgtaagttacaatggttgtagaactgtgttgggaataaaaactagataagtcaggacgggtcctaattaagtcgtgtctcggtactgtagtggc

SEQ ID NO: 496 - DNA, 898 bp, Hordeum vulgare
  misc_feature (797)..(797): n is a, c, g, or t
gccgcagtcgcgtactggtcgctgggctcatcgtgccggccaggagcggcggccgcggtagctcggggagcttgcagcagcggtggccgcaaaaggatcggcgacggcggcaccctactaccccgtagcctccgatagaggcccctcttcctgttcgagctttgtcacaacaaaggaatctctctgggagttacattgagcactaggaataatctgcaatggcagaggccagtcctagaacagaaacgtcagatgatactgatgaaaatcttatgcttgaaccagggaatgctgctcttgctgttgcttctgactctagtgacagatccagagacagaaacggagatcaaaagacaatgcgtcggcttgctcaaaatcgcgaggctgcaaggaaaagtcgtttgaggaaaaaggcatatgttcaacaattggagaatagcaggctaaagcttacccagctagagcaggagttgcaacgagctcgtcaacaagtttgcttttattgcttgtcactgtcttgagttctggttacaagacttcatttgaagtttgcttactgaaatttccttcacagggcatttttatatctagttcagcagaccagtcccattccatgagtggaaatggggcattggcttttgacacggagtacgcacggtggttggaagaacacaatcgacaagttaatgagctgagagctgcagttaatgctcatgcaggcgatactgagctgcgcagtgttgttgagaagatcatgtcacactatgatgagatttttaagcaaaaagaaatgcggncaaagcagatgtctttcatgtgttatcaggcatgtggaagacaccacctgagaggtgtttcctatggcttgaggtttccgaccttctgaccttttaaagcg

SEQ ID NO: 497 - DNA, 568 bp, Hordeum vulgare
  misc_feature (444)..(444): n is a, c, g, or t
gcgaaggggagattccagttgaagcctcttgttgtgactgaattgattcaggtatgtagcatgcaagcagagcaaaggatgaacttaacaattaccaaatctacctcatttgatttgataagcacctcctttctctaacgtcatcagttggggtggaacctagtctccaagcagcatacacaatttttctccaatttcgtcgtttttcttaaagagaaatagcataaggagaaaccattactgattcaaaagataaatggatgattatatgggtgcatggcaactatacaacaattatgaagacgatgttcctgttcatgataatgatgatgatgatggaggctttcagttttaattaagttgtagggaatggagttcttgctagatgatgttcctcgttaagttttagataagttgtacgaatgttgatggatggttcaagtntaagttttcttgtgaagaaaatatttagattgcacatcacatttgggatgatgttcctcatgtaatatcattactgtaatccaacaattttatctaatatatgatttcttccaaaaaaaaaaaa

SEQ ID NO: 498 - DNA, 819 bp, Hordeum vulgare
cttcaacacccccgaggcggccgccatggcatactgaccacggccgccttctccgtgcggggcgccgccgccatcctcaactaccccgtcgaccgcgtccaggagtcgctgcgcaccctcgcgctccgtccagacacggccggagggtcccccgtgctggccctcaagcgccgccactccatccgcaagcgatcccccaacaaggccaagaagaccaccgccggtgctaccatcctcgctcccaccaacaccaagatgatcacgacgaacgacgtcgaccaggcggcagccgcgtcgacggcgggctctggcgtggtggagcttgaggacctgggcgccgactacctggaggagctgctccgggtgtccgacgagccgtcggcgtcatctaccatggtgatgacagggtacgatcaccaacaccatcaccatgtttatgtggacgaccaatcggcgctcaccaacatggggccgatgctattccctcattgctagctagctacctagctccatccatccatccatcatccctcctctggtttgagttgaattgcaaatagtgcccacccagatcaaccgaacgctccatcagtcgtagccagtttcctttcttccttttcagcagcagccttttttctttttctttttcttgttgctgttggttgccaagttgcatgccccggcaccggcaattagtcaggcgggaaaacggccaagggacaacgggttttggatgcatgaatggtatgtatgccccctctcttttcaacggtcggagcggaccttataaaaagaaacttgttttggaaaaaaaaaaag

SEQ ID NO: 499 - DNA, 718 bp, Hordeum vulgare
  misc_feature (24)..(24): n is a, c, g, or t
gtgagaaacaaaggtaaatacatncctggccgtgtttggtaccataaaacatgctccaaacactagaggtggcagcgaatataacaaatacttggattagtgcataatcaaatgcctaagatgctattgagtttctagaaacgagtgaaagcggagaagtcaaaccccctcaaaacagtacatcagtgcgaatttgcttgcgctgccttctggaaaaaaactagatcatccacgtgacacggaatcatcgcttccgtgactgtgggtactgtacagctaaacctagttcaaagaaatgctcacccctttctcccacagataaaagacaacttgattctagtttcacagcaagcagtcaaattgaagtcaaattcatggctagtggggttcacatcttcaggagagcatggttagatcttcattccttatcacctgattctgctcgctcggttgttccattttgactgttatttggaacatccttcacggtagaagattctggggggtcagaaggtaactttgatccttctgccgacgttgaagcatccagcgccttgtctgcagcaggattgcattgctgctcgatcataatctgaaggcacttcccttgctcctcgattctcagctgcagacttctttgcacctcaagttgttcatggagccgctttttgaagttctaactggagacgtaatgcttcggtgagatcaaaattccctt

SEQ ID NO: 500 - DNA, 339 bp, Hordeum vulgare
gaaaaggaggcatgagaaggccatgaaggatgaataggaaaaatggtggagctgtcctgaaagatttgttgttggccgacgttgaaactgcttccggtaaccttgccgaagctgatctttatgaatatgcttctggttaaagaataggaaatgatgataatcagtatgcatcaacatgtgtaatctgcgcatcagatttgtccaagtaactgaattcttggatatgcatggtttgtatcataacattgctgtcacgacaggaaatttgggaggcgtccttttggacatcagtactgggatggccccatcagtcaaaaaaaaaaaaaaaaaaaaaaaaaa

SEQ ID NO: 501 - DNA, 435 bp, Hordeum vulgare
  misc_feature (46)..(46): n is a, c, g, or t
  misc_feature (131)..(131): n is a, c, g, or t
  misc_feature (381)..(381): n is a, c, g, or t
cacgactttttttttttttttttttttaagtcgattggttactcancataactgactgaatcaagccaatttacaaatgtggtccttgaaattgaccaaaacaagttggaagagtagagcattggatgtanctagtttcagtcagccatggagaaatggatggatatccactgaaccaccaaagtgccggcctgttcattcctgatcagcagctgcagcagtttacactgtccaaacttgtgttgtgtggggagtagactaggtcaaggtcgacggtgtcctcgttgggatttgggatcccggtcgtcgtcctcgtccatggagacccgcggctgcggaagcagaggaggcccagcccgatacgcccttgcaccccatggncagtggccgcaggagcacgttcgaggaagaggagccgcgagtgggggcaagaga

SEQ ID NO: 502 - DNA, 704 bp, Zea mays
ttttttttttttttttcggggttcaatcggccgtagaccttcatctatataaagggggaggtctggatccgtttccaactgtttcccgagttaatcccgcggttttaggtaacaaatcccgctagaaactaggaaccctaactgactctgcgcgcgcgcggaccgttctttccaccaccgcagactgtccggaccgcggaccgtccggcctcagcgccggactgtccgcgcggctcaatttgacttccaatagacagcttcttccacttgcgccagttgcacggagcaacagcggcatccggacggaccccagttgctcccgagctttatcgcatattcgcattccatccggtggagctgtcacgcaagtgcagcgcagggccttgcccccgctttcgccggcgcatggctagactagacgacgatctgctccacgcgcggagccatcgccgcctgctcgaccggcgcggcagggaaccacggctgggccggccggttaagctgggagggcgagggcaccagcgccatggccatgttggcagccgcggcctcgcctcgcttccgcctcttgtgcgagccgctggccgaagacgaggaggagtccgaggaggtggcgggctcgggcggcgccggcgacgggcgcttgtccccggagccgatgcggagcgggaagttgatgatcgcgcgcgatccgcgcatgcggt

SEQ ID NO: 503 - DNA, 648 bp, Zea mays
ttttttttttttttttgaatataactgttcccctctccttagaccgagccacgcacaagcacgaggtcatcaggtgatcacatttggcgcgcagtattccgacgacagcatctctcatgtcgatctaggctagctagctgttcgtagcagttagttattacgggttattgggcattgtggaagggaagagatcttgcaagagggcgtagtcagtgaagtggtgctgctgaagaggaggatcaggagcaggagatggcgttgacatatgaggaggaggaggcatacttggcaggaacatgttagggttcgcgcccaccatggcggggtgcatcatgctcatcaggttcaggtccgggcgaaagctggacgacggcatggtcaggtgcggcggcagcgcgtgcgcgctggacatgaagaggtgcgcgccgccggcgcgcatgctggcggggctgtggtgcgtgtgctgcccctcgtacgtcgtgatcaccgtcgacgggtcctggtacgaccgctccacgcgcttcttcacgccgcacttgggcgtagtgcaccggtagtagctccttgggtaaggactgttcttgaccgccttctggccgtatttgcgccaccgatagccgtcctcaaggtgatccacctcgctcttgg

SEQ ID NO: 504 - DNA, 129 bp, Zea mays
atcaactacctgcgccctggactgaagcgtggaatgttctcccaggaggaggaggacgtcgtcatcgatctccaagccaagctgggcaacaagtggtctcagattgcgatgcatctgccggggaggacc

SEQ ID NO: 505 - DNA, 832 bp, Zea mays
  misc_feature (17)..(22): n is a, c, g, or t
  misc_feature (724)..(746): n is a, c, g, or t
  misc_feature (803)..(825): n is a, c, g, or t
aattcggcacgagggcnnnnnnagcaagtagccgaatatgttcaggatgagatggaggacagcaagagtcctaagggccgtcagaagttgttctcaaatgaggagaagattcttctgaacaagcgagtgcctgatctggaaacagctacttctagtaaatggcttccacttcacacccttgctgcatctggtgatttctatctattgaatagccttttaaaacataacgtggacataaatgcgcttgataaggatggcttaccagcgatccacaaagcaattctttcaaagaaggctgctattatcaattatcttttaaggaactcagcaaatccattcatccaagataaagatggtgcgactctaatgcattatgcggtccaaacagcatgtagtcagaccataaagacacttttactgtacaatgttgacatcaaccgtccagatgattatggatggacacctttgcatcttgcggtacaaacacagaggactgacattgtgaagctgcttttaataaagggcgctgatagaactattagaacccaagatggattgaccccgttggagttgtgcctccggttgggtcatgatgtgcggacgtatgagcttatcaaactacttaaaagtttccgaggacaaaagcagcatgatttagtttagcaactggagggtgtgtgaccctctttgaaccagtgaggttaaccagtgtggtggccttctnnnnnnnnnnnnnnnnnnnnnnnattaatgattcatggaatcgctcctggtttgagataggtacatgccaacttcattgnnnnnnnnnnnnnnnnnnnnnnnattggcc

SEQ ID NO: 506 - DNA, 631 bp, Zea mays
  misc_feature (298)..(298): n is a, c, g, or t
ccacgcgtccgatcgcagcatagatctctttctcatcgtcaatggaggtgggtatagtaccagacaacatggcaacgacagacatgccaagctccggcatcctgctgacgcctgctggggccatcagcctgttctcgtcgggtcctccgctccagatgccgcttcacttggcctccatggacagggaggctagggtgctgaggtacagggagaagaagaagagcaggaagtttgagaagaccatacggtatgcaacgaggaagacgtacgcagaagcacggccgaggatcaagggacncttcgcgaaaagatcgtctgatatggatgtcgaagtggatcagatgttctcagctgcggctctgtcgtctgatggtagctatggtaccgttccatggttctgaaggaactttagtgagacattatatgtatcatacagtataataattgtaacatgcgttgaccatatatagtggtaaggtcaagtacaagtagttctaggaaaccgatggtaatgagtgatattgtgtttgttttgaaagataaatgaacaaatatcttagcatttgagttttggtttgtaattgcatgcacatatcaggtctatacagaattttcagtcacttaaacaaaa

SEQ ID NO: 507 - DNA, 696 bp, Zea mays
ttttttttttttttttcgaaaaagagagatatctcgagctcttgcacatccaactgctgtacaaaaattcttgcacgcacacgaaacaataggaagaatctggtcaagcaagagaccgccacggtctgatctgcatcagccatgggccgatcatcaatttaaagagaatgaaagcctgacggattaaccagtctagtcgacggatcagttcacacacacttcacagcctgagcgtcagatcgggctcctcccgggcatgcacggcgacgccgccagccgagttcaggacggcgctccccgccggcgcaggagcgacggcggtggctggtctgaagctcccgggccagccgaagctcatctccgcctcgtcggccacgaggaatggcatggggctcagcagcccccgcgcgggcctcagctcggcggcgtcctcgtgccgctgctgctgctccgggtgcgctgccatcgatgcgtgcgcctggatgccgatggggtacaggccggagccgtacagcggcagggacgccacgtcggcgtagtagccgtaggggcccgccgcgtcgagccgcagcgtgcgccgggccagcgtgcgctcccgccggtgcgcgttctggtgcccgcccagcgcctgcgagctgaagaacttgcgctggcagtagttgcacgtgaacacgcgcgacggctcgcgggcgaccg

SEQ ID NO: 508 - DNA, 785 bp, Zea mays
gaccacctcctaccccgctgcaaccccaaatctctccttcgcatacgcgcgcagaggaggagctgagaccaaagaagaagaagcgagcaagcacaagcttagctagcgtggaggtacccaaggcgagagaggcgacgacggccgccgcgccaggctagccaaccagctgctcatcgctcctagctgcggascgatatggctggcgccgacgtcgacgtcgggacggagctccgcctcggcctgccgggaggaggcgccgatgcggccaaggctgccaagaggggcttcgaggacaccatcgacctcaagctcaagctgcccaccgccggcatggaggaagctgccgctgccgccgccgccaagccggagccggcagccgagaaggccaagaggccgccgaggcgccggccgctgatgccgagaagccacccgcacccaaggcacaagctgtgggttggccaccagtcyggtcatacygcagaaacgtcatgaccgtccagtctgttaagagcaagaaggaagaggagcctgagaagcagcagtccgctgccaacgccggcggcaacggctccgccttcgtgaaggtcagcatggacggcgcgccctacctgcgcaaggkggacctgaagatgtacaacagctacacggagctctccgttgctctgaagaagatgttcagcactttcaccacatccgggaacaacatgaatbagggaaaactggttgatcbggtcagcggtgctgatggtkgtcactacttacgaagacaaggatggcgactggat

SEQ ID NO: 509 - DNA, 504 bp, Zea mays
tttttttttttttttatataaagcttcggatctatagatagatagatagacactacagataagtaaagtaatggaactacaaactttcctcaggcaaaagcagcaggtgacagctgtacacattgctatatatatgtcaagtgaagatcctcaaaacagcgacgaagtacgttccctcgttcctccaacaagccatgccactaaaagccagtgcgtactggtgacgctggagttgcgcttgcgcctcatcgggcggctcttggtgccaagttaacggcctctgaacctttcatcaggcgaaggcgccggcaggtctccacgaacatcctgcaaaaaacaaaaaaaaaacacagtatgaccaaggaagaaaattataaatgaaaataaactcggacaggcccggctcgtctcattgatcgagacagaatatttttctagaaggatcaacctagctctattccccacttatagataggttgatccttctaaaaaaaaattcctgcg

SEQ ID NO: 510 - DNA, 499 bp, Zea mays
  misc_feature (19)..(43): n is a, c, g, or t
ttttttttttttttttttnnnnnnnnnnnnnnnnnnnnnnnnnctagtgtgctagcgccgcctcctcgccggcgtcgtccaaaaaccaaaccgtccggccgagagggaggggcactcgaaactgaaaaagtttcccatgggggcgtgtgtggtgtggcctgtacagaacacacagcaacagactgaaccctcaccctacgtacggtgtatgacgtgtgcatggaggacctgagcagccaagcctcttccagcacacactctgtgaactaattcggagagataagccgcgtagggcatatggcgtccacaccaacaacaatcactgccgggatgatgtcctcggagataggttgacggcctcggagctcttcatgaggcggatcctcttgcacgagtccacgaacatcttgaaggggacgtctccgacgagcatccagtcgccgtccttgtcctcgtaggtgggcatgtactcggcggcggtgtcgatccgccccgcccc

SEQ ID NO: 511 - DNA, 687 bp, Zea mays
gaagagtttttttttttttttttttaacaccaatccagctacacacggatatattattgcttctggtccatgaacgagttgaacaagacaggtctccctccaactagtaattaaaacgcgttatatttctagtaggaaaaaaaaaacggcagcgcactgcaaggggaccattcttctgatacaatgggcaacatctttaacactgcatcttcttcagctcttgttcttgcacttatccttcgttcttggtgcaagacctatggcttcagaactcttcatgatcctcagacgcttgcatgagtcgacaaacatctcccacgggacgtcgccgaccagcatccagtcaccatccttgtcttcgtaagtagtgaccacatcatcagcatcgccggccggatcaaccaatctcccctcgttcatgctgttcccagttgcggtgacgaaggtgccgaacatcttcttgagtgcagcggagaggtccttgtagctgccgtacgtcttcaggtccaccttgcgcaggtagggcgcgccgtccatgctgaccttcacgaaggcgttggcggcagcgggctgttgctgcttctcaggttcctcttccttcttgctcctcacggcctggacgacggtcatggcgttcctgcggtacgaccggactggtggccagcccacggcctgtgccttgggtgc

SEQ ID NO: 512 - DNA, 1116 bp, Zea mays
cgcttcccccgctttctccttccttcctcctcctcccggctcccctcacccagccaccggccatgtcggtggagacggagcggagctccaccgagtcctccggggcttccgggctcgacttcgaggacaccgcgctcacgctcaccctccgcctcccgggctccgcgccttccgccgccgccgccgccgcggcttccctgtccctctcctcctcgtcgtcctccgccttccccgaccccgaccgcaagcgcgcctcctccgacgctgaccccggccgctcctccccgctcgccgcgtcctccgacgctgcaccggcacccaaggctcgtgtggtgggctggccgccggtgaggtcgtaccgcaagaacgcgctcgccgacgccgcgggctccagcaaggccgccaagttcgtcaaggtggccgtcgacggcgcgccctacctgcggaaggtggacctgcaggcgtacgccggctacgaccagctgctccgcgcgctccaggacaagttcttctcccacttcaccatcaggaagttcgccgacgacgagaggaagctggtggacgcggtgaacgggacggagtacgtacccacgtacgaggacaaggatggcgactggatgctcgtcggcgacgtcccctggaagatgttcgtggaaacctgccagcgccttcgtctgatgaaaggttcagaggccgtgaacttggcaccaagagccgcccgatgaggcacactccgttgggcgttggcacgcacgcacgcactggcgtcttgaaggaaagggggaactctgctggtcttgatgaggatcttcacgtgagataggaacgtgtgtacagttgtcgccttatggtattgagttgaggaaacttggaagttccattacttgtctgtagtctctactttatatagatgcgaagaagcttgagatacacattgcctacaatgtcttttgatgaataagaccagacagcaccgaaccgaactcgtcctccacacggttgctttgccatctcggtggttttgtggtggtggtggtggtcgtgcttcctataggtgtgaggctgatggcgtggctgccatttatacaatctttaatcgtgttttgttgagctttt

SEQ ID NO: 513 - DNA, 1519 bp, Zea mays
ccacgcgtccgtcccttcccaacccaacccattgcatttgcaagcccttttacattgcagagcgccagagcctcgctcgctctcggaacagagctaggcagctaacagacgaagaagaagcaagccaagcagaattgagagagaggcgaggacgtggcgacgacggcagccgcgatggcgacgacgacggacctggggttcgaggcgacggagctccgcctgggcctgcccggcgggggaggtggaggggagccggcgctgggcggcgaggggaggagctcttcctccgcctccggcaagaggggcttcgccgagaccatcgacctgaagctgaagctggagccagcggccgtcgtggaggcggaggaggaggaggaggaccacggcgttgctgttgcccttgagaaggaggaggaggccgggaagatgaagcggtccccgagccagagcagcgtcgccgccgccgccgtgctggctgaccccgccgagaagccgcgcgccgccaaggctcaggtggtgggatggccaccggtccggtcgttccggaagaacatcatgtccgtgcagtccgacaagggcgccggcaaagacgccgccgccgccaacggcgacaagtcctcggcggcggcaggcggcggtgccgcgttcgtgaaggtgagcttggacggcgcgccctacctgcgcaaagtggacctcaagatgtacaggagctaccagcagctgtccaaggcgctcgagaacatgttcagctccttcaccatcggaagctgtgggtctcaagggatgaacggcatgaacgagagcaagctggtggatctgctcaacggctccgagtacgtgccgacctacgaggacaaggacggggactggatgctcgtcggcgatgtgccgtgggagatgttcgtcgaatcatgcaagcgccttcggatcatgaaaggatcagaagccattggcctggcaccaagggccatggagaaatgcaagaacagaagctgaggagaagaccgacggacggaagcttgcatctcagcaccaccaggggtggatggatgcaagaagaacaaatctccatggcttttgaagctctgctcgtctctgtatcatactcgtcgtccctgccctccaggcctctgtatctccctgatcaatgaagtcgttttggtgtgtcaactgttctctccgtgcccagcttgtcagtgaaagagtcagtcagtgtctatcaagtctcatcttgtcctatacagaagagagaagccatgcatgaacatgtacctgtcctataacaatgtctttttttgctacctgttttttctctttctctctctttttttttggcacaagatgcaaaggcaccctgctcctgatcaaagggccttttgcatcataagctgtttgattataattaccatggtgtgtcagtggaacaaataactgttgcaaggtgttaaaaaaaagttgtattgtaatatgatcacctctcttccttgttgttttcaaaaaaaaaaaaaaaaaaaaaaaa

SEQ ID NO: 514 - DNA, 659 bp, Zea mays
ttttttttttttttttgccaaatcagtgctgaagctccttagcttcagctgttagctaaccttattattaacaccagacattatgccaacttatgcatggacgtgtgacctactcggttacactttgttatgcacataccattctactataccatgacacatgaatcagttggctactttatatactacgttacattacatccagcacgcctcaatgttattaactgtgtaatgagggaataatgcactagtccagtgatttagtgcgtatgtgaatatgtattaccattgacgctgttatttccacaaatcattgtcccctccacaggaggctgacgttgacacgtagtccaaggcctcttctttctcttcagactgctgaatcacctgcagtgccggattggagtagttattagctgaatccttattaggggtgatgtctccgtggctaagctgggacgccatgaacttgtcgagagctcgccaatctgtgtccccgccagtcgccagatagagaggctcggcctgaagctcctgcagggtgtagcgaggggcaccatgctcctgtgtaaggccgcatgctggctggagagtagtgtctacttggccaataaggtcagggagcttggggctctccagctgagggagctgctgcagga

SEQ ID NO: 515 - DNA, 1714 bp, Zea mays
gcagaaactctttgcttccgcctggctcgcgatgcttgtttgggtgcgcgggctgcggcgaggtgaggcgacggcggcgccgggcggttgcatggtggccgatggagagtagacggggagggtcgtcggcggcggcggcggaagatgcgggcggggcgatgccgagctttgggccaacgcagcacgccattcgcgcagatgtgaacagcatgcaaccttctcgagttactgactttggggcactggcacagtctgctggattccgaatagaagatcttgctaaccttaatgcaaatgctttgttcaatctgaagccaaattctcatacgattgacaacagtcctctccagtttggaaattacggaaagtctatttcttctcatataaatactacagaagcaacaacagctgcaacaagaattgaccctcagctgtcagcacagcaaacaggagcacaaccaattctggtggcgttaccaactggtaacatggagaattggggagagtcagctatggctgatagccctatgactgacacatctacagatccagacactgatgagaggaaccagatgtttgaacaaggacttgttgctgtccccacagcatctgattctagtgacaaatcaagggacaaactagatcagaagacacttcggcgtcttgcccaaaatcgtgaagctgccaggaaaagccgtttacgaaaaaaggcatacatccaaaaccttgagagtagcagactgaaacttactcagttagagcaagagcttcagcgggctcgtcaacagggtatttttatttcgacatcaggagatcaacctcaatcaacaagtggaaatggagctttggcatttgacatggagtatgcacgctggttggaggagcacaataaacatgtaaatgagttgagggctgcagtcaatgcacatgctggtgataatgatcttcgttgtattgttgatagcattatggtacattacgacgaaattttcaagctcaagggtgtggcagctaaagcagatgtttttcatgtgctgtctgggatgtggaagacccctgctgagagatgtttcatgtggttaggtggcttccggtcatctgagcttcttaagttactggcaggtcacctagagcctcttactgatcagcagcttgttggtatatccaacctgcagcagtcctcccaacaagctgaagatgctctttctcaagggatggaagcattgcaacagtcgcttgcagaaactctagcatctggatccttgggccctgctggaccttctggcaatgttgcaaattacatgggacaaatggcgatggctatgggaaaacttggcactcttgagaactttctacgacaggctgataatctacggctgcaaacacttcaacaaatgcaacgcatcttaactacccgacaatcagcacgagccctactcgcaataagtgactacttctctcggctgcgtgctttgagttctctttggcttgcccgtccaagggaataaattcaattaattcataactaggataatttttttgtactgtttctagtatggccattagtttcttcagaacgctcatgtgtcagtgagatatttggatcatattgtaggccatcatggtttactggacaactttgtaacaattttggagagaaaaaactgagttgtaaatacatctggaataatctaagatcttatgaaggggaaaa

SEQ ID NO: 516 - DNA, 1163 bp, Zea mays
gagaactggggagagtcagctatggctggtagccctatgactgacacatctacagatccagacactgatgagaggaaccagatgtttgaacaaggacttgttgctgtccccacagcttctgattctagtgacaaatcaagggacaaactagatcagaagacacttcggcgtcttgcccaaaatcgtgaagctgcccggaaaagccgtttacgaaagaaggcatacatccaaaaccttgagagtagcagattgaaacttactcagttagagcaagagcttcaccagactcgtcaacagggtatttttatttctacatcaggagatcaacctcaatcaacaagcggaaatggagctttggcatttgacatggagtatgcacgctggttggaagagcacaacaaacatgtaaatgagttgaggcttgcagtcaatgcacatgccggtgataatgatctccgtggtattgttggtagtgttatggcacactacgatgaatttttcaggctcaagggtgtggcagctagatcagatgtttttcatgtgctgtctgggatgtggaagacccctgctgagagatgtttcatgtggttaggtggcttccgatcatctgaggttcttaagttactggcaggtcacctagagcctcttactgatcagcagcttgttggtatatccaacctgcagcagtcctcccaacaagctgaagatgctctttctcaagggatggaagcattacaacagtcgcttgcagaaactctagcatctggatccctgggccctgctggaccttctggcaatgttgcaaattacatgggacaaatggcgatggctatgggaaaacttggcaccctagagaactttctacgacaggctgataatctacggctgcaaacacttcaacaaatgcaacgcatcttaaccacccgacaatccgcacgagccctacttgcaataagcgactacttctctcggctgcgtgctttgagttctctttggcttgcccgtccaagggaataaattcaattaactcataaataggattttttttgtactgtctctagtatgtcaattagtttcttcacattgctcatgtgttgatgggatatttggatctaagatcttatgaatggatgacatgtatgtgttcaagtgaaaaaaaaaaa

SEQ ID NO: 517 - DNA, 743 bp, Zea mays
tttttttttttttttttttgatggccaacggttacggctgtttataatgatgttcagattacaattacctgcagtgatgatggaaggagcggaggcatcttcgattcttatttttctccacggccgggtcaaacaaagatacataagccgagctgaattcattcccgtggtcgtgcgatccagagagaactcatagcgcgtagccgggaaaggtagtcactgatcacaagcagcgcccgcgcggactggcgggtggtcagcacgcgctgcatctgctcaagagtctgcctccgcagaccgtcagcctcatgcaccaagctttcaagagcgacaagcttcgcaaccgccgccgccatcgtccccgagcagtctggagcggcgtcgtcgccaggcggaggagcacgacctgcaggcacaggcaggcacggggaccctgacgacgcgagggtctccgcgaccgactgctgcagcgcttgcacccgctgcgagatgccctcttcggcttgctgcgaggactgctgcaggccgtgtacgctcgcgagctgccgctcggtgagggggtccagatggcttgcgaggaactttagaatctctgacggtcgaaatccgcccagccacataaagcacctctccacgggggtcttccacatccccgacagcacgtggaatgcgtcggccctggctgccacgcacttgagcctgaacgcttcgtggtgatgcgccatgacgccgtccacgatgcg

SEQ ID NO: 518 - DNA, 769 bp, Zea mays
ttttttttttttttttccctaatttaaactattgtaatattgttttgctctcggttccaccacgtacaaatatgatcctagtatggcctgcatcatgaatcatacgcctctctagaaggccacggccgggtggcaaaacaatatatgtacacgtcttccgcccgtcaaatagagaaggcctcaatccatttccgttttattctctagtcgcttcgcttgacaaacgcacaccgcttgctgctgctgctgctgctgcggagacaccgccattgacttaaaagccttgcatcctttcgtcggaaccgaaccccagtgactgtgaggtcgcttttttcgtcctccactggactttacagcttgggaaagtatacagcgaactgctactattcgtcgtcgtcgtgttctttggtgggcctttggctggccacacccacaccgcgggcatctagctaatcgccgcctcccgcgggcgcaccgcccacagcgagctcatcgtgcggaggcgctggaagtagtcgccgagcgccagcaggcccctggccgcctgccgcgtcgtcaggatcttgtgcatctgttgcagcgtcatcagccggagatggtccgcctgggtgacgaagttgacgagctctttcagcttctccaccgcagtggccatctgcagcatgtaggcgtcgggggccccgaaggggtcagcctcggcggtcaggatctcggcgaggttctgctgtagcttctccatgccctgcgacagcgcgtcctccgcctgcgt

SEQ ID NO: 519 - DNA, 1689 bp, Zea mays
cctttttttaatctccgcttccactgttccaccaaaccaagccgagaaatttctcctaaatttcagatcaaatcctcctcctcctcctcctccccctccccctctccgaggattctgcccagcagcgcgcgatccgctcgatccggaatggagcgcgtcttctccatggaggagatccccaacccctactgggccccgccgcaccctcaaccggcggccggcggcgctgttgctgcaccaggtggagtaggaggagcgggggacgaggcgggcgcgatgaaccggtgcccatctgagtggtacttcgagaagttccttgaggaggccgtgctcgacagtccgggtcccgtcgccggcgtgggtagaagcagcggacaagctggagttgaggcggcggagagcaagccgctgggcgccgcggcgccggcgtccgtctcgagctcggtcgttgaccccgtcgagtacaacgcgatgctcaagcagaagctggagaaggacctcgctgccatcgctatgtggagggcttctggtgcagcacctccagatctttctgcgactgctgcttccttgccaagtgtcggtgttccgcatgcagctcctcttaaacccgtcggaggtactgaaagtctagttcaaaacatgctagctggtgctccagtaggggggtcaggtccacatatagtacaaattgctgatatccctgttaagcaaaccactagctcttcctcacgagagcagtcagatgatgatgacatggaaggcgatgctgagacaaatggaaatggaaaccctgttcaacaaagacaacagagaaggaagcaatccaatcgggaatcagccaggcgttcgagaagcagaaaggcggctcacttgaatgaactggaggcacaggtagcacagttaagagtcgaaaactcttcgctgctaaggcggcttgctgatgttaaccagaagttcaatgaagctgctgttgacaatagggtgctaaaggcagacgtcgaaaccttaagagcaaaggtgaagatggcagaggactcggtgaagcgggtaacaggcatgaacgcattgtaccctgccgtgtcggatatgtcttccctcagcatgccattcaatggctccccttctgactccgcctctgatagcaccgtcccggtacaagatgacctgaacagttacttcgccaacccaagcgaaatcggaggcaacaacggttacatgccagatatagcctcctcggttcaacaggacgacaattttgtcaacgggtatcaggctgctggcaagatgggcagaacagactcgctgcagcgggtggcaagcctggagcacctccagaaaagaatgtgcggaggcccggcttcatccggctcgacctcctaggtttcatatgaaaaagtccctggtgcctaacggcaagaatgctaaattaacaatttcaacatgctttgtactggacattgataatcctgcgatgcgcattagtgcgttatgacttgtgggtcaattgctatttggcgtgtgctggctcgtcactgtagtgagctgaacaagttccagtttctatcgaagagcaacctctccttttcgctagtgacttatgaatggtcgatggtttattagcaacattgtgtctttcgcaagttcagtaatgaatggtcgaccagggatgaaaataaataacttataaag

SEQ ID NO: 520 - DNA, 1520 bp, Zea mays
cttctcttccaccaaaccaagtgcggccagagaaatttctcccaaatttcagatcaaatcctccgaaatctccgacacctagcccaccggagacttctccccaacagtgtcgcgatccgtctcgatccggcatggagcgcgtcttctccgtggaggagatccccaacccctactgggttccgccgcaccctcaatcggcggccgccggcgctgttgctgcaccagcgggggaggcggcggggctgatgaaccggtgcccgtcggaatggtacttccagaagttcctggaggaggccgtgctcgacagcccggttcccgtagccggcgtcagtaggggcagcgttggagctggagttgaggctgcggagaggaagacaccggggaccgcggcggcggcggctgcctcgagctcggttgttgaccccgtggagtacaacgcgatcgtcaagcagaagctggagaaggacctcgctgccgttgccttgtggagggcttctggtgcagcacctccagataattctccagctggttcatccttgccaagtgtggatgttccacatgcaggccctcttaaacccatgggaggtactggaagtctagttcaaaacaagctagctggtgctccaggcgggggatcaagtccacatgtagtacaaaatgccgatattcctgttaagcaaaccactagctcttcctcacgtgagcagtcagacgatgatgatatggaaggagatgctgagactactggaaacggaaaccctgttcaacaaagattacagagaaggaagcaatccaaccgagaatcagccaggcgttcgagaagcagaaaggcagctcacttgaatgaactggaggcacaggtagcacagttaagagttgagaactcttcgctgctaaggcgacttgctgacgttaatcagaagttcaatgaggctgctgttgacaatagggtgctaaaggcagatgtcgaaaccttaagagcaaaggtgaagatggcagaggactcagtgaagcgggtaactggcatgaacacattgttccctgccgtgtctgatatgtcgtccctcagcatgccattcaatggctccccatccgactccgcctctgatgccgccgtacccatccaagatgacctgaacagttacttcgccaatccaagcgagatcggaggcagcaacggttacatgccagatatagcttcctcggctcaagaggacgacgatttcgtcaacggggctcaggtcgccggcaagatgggcagcactgactcgctgcagcgggtggcgagcctggagcacctccagaagaggatgtgcggaggcccggcttcatcggggtcgacctcctaggttcctactccatcggatatgataaaggccctgatgcagtgatgcccacggcaaagaatatgataaattaacagtttcacatactttgtagtggacattgctaatgctgcgatgcgcattcgttcgttgtggacttacgggtctactgctattgatttattgttcgttctc

SEQ ID NO: 521 - DNA, 1751 bp, Zea mays
tttctttttttttgcctctccagaagtttctgcagggaggcacagcaagagagagagcccagcactagataagtagggggggaaagaagagcatccaagcgtactcctcgatctcctttcaagcagctaacataattaactcatgggtgcatagagatatgccgccgacgacccatcatatctatgggtccctccccttgcactgcatctccttcaattcctagtgtttgcttctcccttccttgacctttgcttggaaccattgattgatagttacttattattgggcatggagcacgtcatctcaatggaggagatcctcgggcccttctgggagctgctaccaccgccagcgccagagccagagccagagccagagccagagcgagagcagcctccggtaaccggcatcgtcgtcggcagtgtcatagacgttgctgctgctggtcatggtgacggggacatgatggatcagcagcacgccacagagtggacctttgagaggttactagaagaggaggctctgacgacaagcacaccgccgccggtggtggtggtgccgaactcttgttgctcaggcgccctaaatgctgaccggccgccggtgatggaagaggcggtaactatggcgcctgcggcggtgagtagtgccgtagtaggtgaccccatggagtacaatgccatactgaggaggaagctggaggaggacctcgaggccttcaaaatgtggagggcggcctccagtgttgtgacctcagatcaacgttctcaaggctcaaacaatcacactggaggtagcagcatcaggaataatccagtgcagaacaagctgatgaacggcgaagatccaatcaacaataaccacgctcaaactgcaggccttggcgtgaggcttgctactagctcttcctcgagagatccttcaccatcagacgaagacatggacggagaagtagagattctggggttcaagatgcctaccgaggaaagagtgaggaaaagaaaggaatccaatagagaatcagccagacgctcgagatacaggaaagccgctcacctgaaagaactggaagaccaggtagcacagctaaaagccgagaattcttgcctgctgaggcgcattgccgctctgaaccagaagtacaacgacgctaacgtcgacaacagggtgctgagagcggacatggagaccctaagagctaaggtgaagatgggagaggactctctgaagcgggtgatagagatgagctcatcagtgccgtcgtccatgcccatctcggcgccgacccccagctccgacgctccagtgccgccgccgcctatccgagacagcatcgtcggctacttctccgccacagccgcagacgacgatgcttcggtcggcaacggtttcttgcgactgcaagctcatcaagagcctgcatccatggtcgtcggtggaactctgagcgccacagagatgaaccgagtagcagcagccacgcattgcgcgggggccatggagctcatccagacggcgatgggatccatgccgccgacctccgcctccggatctacaccgccgccgcagattatgagctgctgggtccaaatggggccatacacatggacatgtattaggcactgcgggtttcgtgatcgctgggaacattttatttgcaggcgtcgctgaataaggctggttgtctcgatctcccttgacatgaaatccaaataactcacaattaaccatgagtgttccgtttggtccc

SEQ ID NO: 522 - DNA, 1931 bp, Zea mays
  misc_feature (95)..(99): n is a, c, g, or t
  misc_feature (285)..(289): n is a, c, g, or t
  misc_feature (301)..(342): n is a, c, g, or t
  misc_feature (404)..(408): n is a, c, g, or t
  misc_feature (587)..(592): n is a, c, g, or t
  misc_feature (713)..(809): n is a, c, g, or t
  misc_feature (1154)..(1179): n is a, c, g, or t
  misc_feature (1353)..(1358): n is a, c, g, or t
  misc_feature (1439)..(1444): n is a, c, g, or t
ccacgcgtccgaaaggaagagtaattacgacacagtttgcctcaaacatacatcgaattgggagcatcaaagctgctgcagatttaactggtcgnnnnntggtatttgttggaatgtcactcaggacataccttgaagctgctttcaaggatggaaaggcaccactggatccatcaaccttgatcaaggtagaggatatggatgcgtatgcccctaaagatcttttggttgtcactacaggttcacaaggagagccacgtgcagctctgaatcttgcatcttatnnnnnaagtcacgctcnnnnnnnnnnnnnnnnnnnnnnnnnnnnnnnnnnnnnnnnnnttattcctggaaatgagacacgggtaatgaagatgatgaatcgtctcactgatcttggcccnnnnnttatcatgggtaaagattctggcctgcatacctctgggcatgcctaccgagaggagctggaggaagttcttcggattgttaaaccacaacatttcttgcctgttcatggagaactcctatttctcaaagaacatgaatcacttggaagatcaactggcatacggcacacaactgtaatnnnnnntggagaaatgcttggtgtatcgcatctaagaaacagaagagttttgtccaatgggtttgtttcattagggaaggaggatcttcagctcatgtatagtgatggtgataaagcttttggtacnnnnnnnnnnnnnnnnnnnnnnnnnnnnnnnnnnnnnnnnnnnnnnnnnnnnnnnnnnnnnnnnnnnnnnnnnnnnnnnnnnnnnnnnnnnnnnnnnttagcgcagtctggtttgaaaggaaaatttaagattacgacaagatgtctatggcttgataatggaagattgttagacgcactctacaaagcagctcatgctgcattgtcaagctgtcctgtgaattgtccacttagtcacatggagaggatggtagctgaaatcttgaggaaaatggtacggaagtatagtgggaagaggcctgacgtcattgcggttgctatggagaacaccacagcaagtatctcagaacacctcgatgctaaatcatctggaaattttggaccttcctcagctactagccatctgagcaggagtccagctatgactcttgaaggcagttannnnnnnnnnnnnnnnnnnnnnnnnntggatgctgaagaaacccttcctgaggccgcgagaacagcaccagatgatgcaaccacaagttccaatggtgaagcattcttctcttcagatttacatcagcctaaaacattggagcacttctgggagtcattcaaatctcctacagctgttaaaattgcacggattgtcaatnnnnnnaagaagcaaaatctcggcaagattggcataatgggtaaggactcatcaatccagtcagctccggctccagctaaatcttcnnnnnngaacaagtggaaacctgaggaaatcaagagcttaatacagatgcgtggcgagatgaatgagagatttcagagcgtgaaaggaagaatggtcctgtgggaggagatttccgacaacatgttgaagcaaggaataagtcgtactccggcacagtgcaaatcgctttggacatcgttagttcagaaatacgaggaaagcaagaaggacgcggagagcatgaagacgtggccgtatttctcggccatagataggatcctttcgcagcaaggggaaatggcaaccaaaggatagagaaggctgtagcttagtggtagaagtttagaacatttgatatgttgtagcagagcccagtcagtgtagtgaggatataagatgaaatgtactgtgtacaggtactgaggtacagcacctggcaatttattgggaccggattcccttgttctaagtaaggtcgacgatcggtagcacgagatctagatggcaatttat

SEQ ID NO: 523 - DNA, 129 bp, Zea mays
accaactacctgcggcccgacatcaagcggggcaagttctcgcaggaggaggagcagaccatcctccacctccactccgtcctcggcaacaagtggtccgccatcgccacgcacctccccggccgcacc

SEQ ID NO: 524 - DNA, 595 bp, Zea mays
  misc_feature (34)..(34): n is a, c, g, or t
tttttttttttttttaaagagagttaatacttanttacatcatctgaaacattgtatctttaacaagtatcacatcaaagtaaagcggaaataagcaactgggcaatcttcccaggaagttgaccggcgcatcgttagacttagaaatcatcgtcgtcgataaaatctccatcaaagtctccagcatcaccctcttgctcaacagcgtcttgcgggtcgtccccgaacgagttcggattctctaccacacagtcggcttcttgggttcgcacgtgtgacagggatggctcgacggggtttcggccgggtggagaagagcagggctcggcttcggatgacgggtggcgtagctccggcgatgaacggcgaactccggcgacgagtctggctggcaggctgctggagcgcagacgacgcacacagatgacttcgcgacaatgaagtaacgaactcagcgcaagggagcaaatatttggagcatgagaacaaccggagccagcaggggagaggagaacaagctcggctcagattttataggcggtaggagaggaagattcgtggccaaattaatagggattgaagatgagaaacggag

SEQ ID NO: 525 - DNA, 658 bp, Zea mays
atgacctaataactctaccccagcccactactacctcttcctgctgcaggttctcctttccatcctttcctctaactttggaaccaccaagaagctcagctcaccgtctgcaaacccgttgggagctaccatgagccgaggctgctgctggggcgtttccaccggcggcggcgtgggtgtgcagacgacggcggcggcggttcctgatctctcactccacataagccctccgtcgccaccggccggcggcgtcgaggtgctgccggagccgaggctgctgctggggctggggctggggccggggccggggctggagctcgacgacgacgacgccgccgtggcgacgaagaaggtggacgacgacgacgacgcggccgcggcggcgcgggagcacaaccttcacgcgcagcggctccggctgcagttgcaccagccgagccagacggcccacgggttcaagaagagctcgtcgggcaccgctgccggcggcgggaggagaagctccagggcgccgcggatgaggtggaccaccgcgctgcacgcgcacttcgtgcacgccgtcgagctcctgggcggccacgagagagcaacaccgaagtcagtactggaactgatgaacgtgaaggatcttacactagcgcacgtcaagagccacctg

SEQ ID NO: 526 - DNA, 620 bp, Zea mays
ttttttttttttttttctggcccctgctgagaaatcaggctgcacacgcggcgcgcgtcgtcggacggcggcgaccagcacgcgggcgggctgtggtcgtcggcgccggagcagcagtacacgacgtcgcagcacagcacgtcgcagtcgcagtcgcagtccgggtcgccgcaggggccgctgcagctggcggtgtcgagcagggccatgtcggccaccgccggggacagctgcgacgccggcgacgaggcccacggcggccggtcggagagctacggctgggagatgccgcagcacgggacgaaggcgtcgtcgtcttgatgatccttgtccttggacgggatcacaattcacaacagtatagaagacggtgcggcgtggggcatggtactgaggacaactgcggaagaggcggcattttttgtacaggcgttgagatgatttcatttttcccccttccttttttttctggtagagggaggaggatgtgatggtgaagatgaactgatctggtgttgttgatcgagagtgaggcatatgagatgagatgttattttttacatcccattgtacaatctggaggctggatcgcgttgttttaacggggatggatcggtttt

SEQ ID NO: 527 - DNA, 477 bp, Zea mays
tttttttttttttatttcactactaaaaatgtttaattgcaagagactgagctggtccaaccgatacatgtttaattgcacgcaaacgacgtatggagcgcgtggtagcaccgcgtgacagtggcgccaattgcgacttgccagtgcgttttccaatattaggatcgaattggtggtgttgcaacaacatttcatgacacctgctaaaacagacttgccgctacgctacgcggctagtaggtgacggctggcgcgctcgtcggagatcttgccgagtatgtcgttcaccgcggtggcgatgtcgtcgaccgacgacagccggcactggtcctccatctgcatgcagcagcaaggaccacgaggatcgagaatgtgttagtgttactggctgctcagctcatcagctggagactggagtccatcgttgcagtgttgccggtagtctgttgttatactagctgctagttaccttgaggc

SEQ ID NO: 528 - DNA, 527 bp, Zea mays
  misc_feature (19)..(62): n is a, c, g, or t
ttttttttttttttttttnnnnnnnnnnnnnnnnnnnnnnnnnnnnnnnnnnnnnnnnnnnncagctggtatgacaactgtgagagtgacttggagttgtaaacaaaataaagaaaagtaaaggcagcagtctttaatggaattgtgaaaccagcagcttaggctagatttaagtactggaacgaagaatctgaacttctggttgtcttcgtctctactccggcggcgtcatgtcgtcaataccatgcgtgtcacacatcacagcatctgtgcttgtcgacagcaatggcttcctcgggggacaaggcttgcccggcttcaagtgggtgggctcaccactatacacgatctcaacaacctggccatctggcgtcgtctccaccttcctcttcacagggcagctagggtgagtgcacttgtagtagctccgcgggaactcgctgactttcactttcttttgcccgtatttactccacctgtacccgtcaagtgacaagcgactgcgctcaccattccgcctcgcagct

SEQ ID NO: 529 - DNA, 575 bp, Zea mays
  misc_feature (10)..(21): n is a, c, g, or t
tttttttttnnnnnnnnnnnnaaagagagatttattagtagcaagcaacagatggtcactcagctggtaataatacaaatcacactacaggcactatccccatcatcaggattcagatcgtatcaacagacttatcaggctattttgttttacagagttgagcacttgagctggacgcacaaggatgccatacattttcaacaacatccataagctcgttctccctacaacgagctaaaatcctgcctgaaatgcaactcaagttcagcattgactgtcaagccccagccaaataaattccaggcaagatgtgaatctgcagtatgtagcacccaccctggataactgagaccgagacggagatctgaatggacgaactccgaaaatacgcttggtatcctgcatctcgtctccccttgttcagaccaatggcatcacaactgtagatgcgaagggcagcagctcacagtgcgagaagctccgactccttttcctccgccaacggttcgtcaggcaaatggcgtgaaccattatccaattggtcctcgcttgtgtatatcttggaaccgggagcc

SEQ ID NO: 530 - DNA, 129 bp, Zea mays
ctgaactacctccggcccgacctccggcgcggcaacatcacgccgcaggagcagctgatgatcctggagctgcactcgcgctggggcaaccgctggtccaagatcgcgcagcacctccccgggcgcacc

SEQ ID NO: 531 - DNA, 129 bp, Zea mays
ctcaactacctccgccccggcgtgcgccgcgggggcttcaccccgcgggagcagctgctcatcctcgacctccactcgcgctggggcaaccgctggtccaagatcgcggcgcacctgccgggccgcacg

SEQ ID NO: 532 - DNA, 441 bp, Zea mays
ctaagccgccacggtcaaggttgccttctattgccgcccgacccttgaagtgtggctgcagtagttcgtcgtgactcgtggagtcttgtgataagcctcgccgggcgtggaggtaaccgggtgagagggaattcctcatcgtcgtcatacgtacctagtggctgtcgtacgccatggctagccaatctgccaccaccccatcagcgaggttacgagtcacctgaagagcaagttggtacctggaatctcaagtcccaggtcaagaacaggtaccgcaggatgaggcgcatgaaggatgttgtgacgacttcgtgagaggtgtaggccgtcatctcccagtcaactttgggttgctggatcgttgtctccttatgatgtaattatttatttattttgtacagaactcctattatatagtaaagatgtgacattgctttttgt

SEQ ID NO: 533 - DNA, 129 bp, Zea mays
actaactacctgaggccggacatcaagcgcggccgcttctccttcgaggaggaggaggctatcatccagctccacagcatcctcggcaacaagtggtcagcgatcgcggcgcggctgcccgggcggacg

SEQ ID NO: 534 - DNA, 758 bp, Zea mays
  misc_feature (20)..(20): n is a, c, g, or t
  misc_feature (138)..(138): n is a, c, g, or t
ggccttaagcscgcgcccgnctcggacccggagcggaagaagggcgtcccctggacggaggaggagcacaagcttttcttgatgggactgaagaagtacgggagargggactggaggaacatctcgcgcaagtacgtnactacccggacgccgacgcaggtggctagccacgcgcagaagtacttcatccgcctcaactccggcggcaaggacaagcgccggtccagcatccacgacatcaccaccgtcaacctccccgacgaagaccgcggcaacgccaccgtccgcggtcaccaccactaccaacccctccgtcgccctcccggacatgaagcccttcattgcgccgctccaagacgcgctcggcgtgtcgcachcctacggcaacgtgaagctggagcctaagagctcgctggtggccggcctgggcttcaacgactccgtcctcctgatgcactgcggacagttgtaacgggctgttcttgcggcgagaaccgctcccgtcgcaacgtacgccaccaaccaccacctcatctatycycgggcgggcatcagggccggcgcacaagtcgcacgtcgtcgtgctaggcttggatgcagarttgcttcaggtgtactcctaccgatcagatggctggcacgtcccgccgcgtgttacgaggattaagagtggamagtctcgtcgtccagctgccagctcgcggcacyccgagtggctgtdttgtktcatcgagaacagaggcatggccatgggcgta

SEQ ID NO: 535 - DNA, 129 bp, Zea mays
atcaactaccttcgggcggacgtcaagagggggaacatctccaaggaggaagaagacctcatcatcaggctccacaggctcctcggcaacagatggtccctgatcgccagccacctccccggccgaaca

SEQ ID NO: 536 - DNA, 520 bp, Zea mays
ctgatcggctgtcaccatctatgatcctcgcaggtggtctgctctgtcaagatgggtgggctgctccaagtttgagattacaggtcttgcgttttcatcagttgacgaatctttcatctacgtccaaggtgttgattatgagattacctgtggacattggaaacaaagtgagcgagcattctcatttcgaggggattccaactggttggggttttcaaagtgtgccaacaatgatgtgatagcagggtggtgcgagtctggaagtatcttcattgctgatgctaggcagctataggatcaatatccccttcatctggtgccctggagccccggaagtcaccagtatgtgttgtgttttgccatttctgtaagaatgtgatgtttacaggaggaactgttcttaactctccagtaccaagtagcatgcgaactcatgcccattggccattatggttcttgaaaaacatgattattccagatttcatccagcaaattgaattgaaaaaaaaaaaaaaaaaaa

SEQ ID NO: 537 - DNA, 641 bp, Zea mays
tttttttttttttttgaccaaacttaattttattgtcacgataaatcactgcacagatcttacattctggctctagctacagatcaagattcactgatctaactagcagccccaccatttcattcgcagtaaggacgagaagaaacagtggaggcgacataggagaattgtgagagctctgcatgctaggaactgatctgaactgaacctgacgaggccgcactgctaaaaccggagcccctcaagacgcgcgacggcggctggcactcagttccccggcagtgtccagctgaggtcgaggccaccgatgtcgccccacgtgcccgccgttgctccgtcgtcccacggcgcgagcccgtcgtacaagtccgggaccagcaccgactgccacgaggaggagaaggccgggggtgcaagcgcaacgccgccgacgaggtcgagctacgggaagaagctgccgtcgctgaggaacgggaaggcggacggcaggcacgcgtccgcgaccgacggcggcggggatgagggctcggcggagaccctgcgccgcttgccgccgctgccagtggcggcgcggcgcgaggcgccgtcgacggggacgtcgcgcagcgtgcccccgtgcgttcagtatcggcggcacgcgc

SEQ ID NO: 538 - DNA, 605 bp, Zea mays
taaataaacccaacaagggcaacgtaaagttaaaattctagcggggtcaaatctgattctgtagagagccccgttgtttacacaccagaacaagctttaacacctcgactcagcacagtttctcgtatcacactttccatcgtttttgaccagagcaccagatcatccttcgagcattgccttggctgcatcgatgagtgcaggtctgaagctgttcgatgctcggccaagggcagggtagccttccttgtcctcaacatcaacatcagcaccatgtctaattagcagaagagcagcccctttattctcacatataacagcatgcgtaagaggtgtttgtcctgtcctgtcaacagcatcaacttcagcaccttcctcaatgaggaattcacacagctccgcgtttccagtgcttgcagctctatgcaaaggtgtgcagccaaactcgctcaagcaggatgtcgacgatttgagagttgccggagctcgcggcggagtggatcggcgcccacccctcctcgtcctgcgcattcagcacgctagccgcggcgtcaccaccgcactgggcaagcgcgagcaccacctggggatggccggcagcggcg

SEQ ID NO: 539 - DNA, 851 bp, Zea mays
gaaaagcacccctaaggtgtcctgagctaatgargcagacaattgaccatytatcatgtaaaaagtcatcttcagaaatacagaacagctagatacagmccagagttatctgaaggctcttctgaaaagaaagtggcatcaaaagaagatataccatctattgacttgaaagggagttttgatctcactgaagcacttaggctccagttggaacttcaaaagcggcttcatgaacagcttgagatacaaagaagtttgcagctaagaatcgaggaacaagggaagtgtcttcagatgatgctagagcagcagtgcatacccggggcagaaaaggcgcaggatgcttcaaccgctgcagatgaattgaggtcaccttctgagattccagaatcttctaccgtcaaggaagttccagaaaacagtcaaaatggatcaaccaagcaaacaaaataagctaagggccgatgaagttgcaagcatgaaatgtgtttcatgayccgattggctgtttccaggcttaaatcaagttgtttttgtccttccgtgggaacagatgaacgctatagttaacttccttgcaaagcctggctaggtgcatgtaactaggagttagttgtatattacctaccctcacggtatcactgaatcccagtgttatgcggatgatgtagtcttcagaagacagcgcaagcacattgtcagggctttgacttgttttgccccccattacttaggtatcaagtagcgtctcctaggcatttgattatgggctaattcaagtgtttacaataatgtttagcacctgttgtttaaaacatgtcatggtaccaaaatatgacgaagctgtattg

SEQ ID NO: 540 - DNA, 718 bp, Zea mays
tgggtaccgggcccccctttttttttatcatcacagaatttcactccaaaatccaaatgccctaataccgaacacataaacatgaaatggtcccaaaacataaacagactagaagggttcctggatcattctacaacatggatcgatctgccagtgcgacaaggaacaatttcaactaattgaatgaattaaataacaaataagcttacagagcaggaagcagcacaaggatgtcaggctattatgaacaatgggacgtattgaaacggcagattctcattggtaggcctcgttagaaggtgctgctgctttcactagcagagatcgagctgctctctgacttgacaaccagtggcccctttccaatgtccaaaccctgcagccgtccaagagactcttgctgcattatgtctgggagagtgtttgggtgggacagcatctggtggtttggcacattgggatggggtgggtggaacggtggtggcaactgggtggtaccagggtgtggagatgcattttgctgggaaagcggaaagaaggaagagttgtatggaatatgctgaaatctcatgttatatgtctcactggaattggtcatctcaccagtaacaagcttaagcctctccagctcctgctttagtgcatcattcagagcatcgcggagttgagcctgttgctccatggcatgcaaccttatcttaagctctgcattttctgc

SEQ ID NO: 541 - DNA, 462 bp, Zea mays
tttttttttttttttttttttttttgttttacaagagcaaaaattaaggcgagaatcagataatcgtgtgagtagagtacaacgtcagacgatggctatccctccttccgtccctaccacatatctcaagcaaaatcttggagcgaaattcgaattcacgactcctgtgtgctcctgacggatgaatgctggccatggtgacgctacgatgctagtccaggccatcttgatctggatggagcgcatgtattggatgcgaatgggatgctcctgtctgtgttcgtttacgttgaactttgacggctggctgactggctggttggttggtccggcggtggtgccacggttcctgcctgtatgccgaccaccagatgccatgtgctggctgggcggagacggaatggatttcccttctttcgtgctcgtctcaactctcatctcttgtgccaagattgattgatg

SEQ ID NO: 542 - DNA, 494 bp, Triticum aestivum
  misc_feature (158)..(158): n is a, c, g, or t
  misc_feature (290)..(290): n is a, c, g, or t
  misc_feature (308)..(308): n is a, c, g, or t
  misc_feature (338)..(338): n is a, c, g, or t
  misc_feature (345)..(345): n is a, c, g, or t
  misc_feature (347)..(347): n is a, c, g, or t
  misc_feature (357)..(357): n is a, c, g, or t
  misc_feature (361)..(361): n is a, c, g, or t
  misc_feature (364)..(364): n is a, c, g, or t
  misc_feature (379)..(379): n is a, c, g, or t
  misc_feature (401)..(401): n is a, c, g, or t
  misc_feature (420)..(421): n is a, c, g, or t
  misc_feature (436)..(436): n is a, c, g, or t
  misc_feature (442)..(442): n is a, c, g, or t
  misc_feature (444)..(444): n is a, c, g, or t
  misc_feature (451)..(451): n is a, c, g, or t
ctccttccccctcgagcacggcgcgtcgtcgacagcctccatccctcttcttccctcttcatcagccgagcacaactccgtttcacaggtccttcagaaaatgggaaaagtgggttttcttcatgtttatctacaaaatgttcaatgcctcctgtttnataggaggcacggagatgtttccctgggacggatgtgcaaatcctgggttaaaatggggcgaagggcacaaaattaaggcccttaagaatccgggaatgggcgctccttaagatgccaatttgattcaaatnggagtgggtgcttgtgtngtcaagaataaagacatgaattgtgttaangggattnanaaaagaaatngtgnaanagataatgccatagncttggtaaatcctgattttagnagatgcatacacatgtgtnnacatcccaattcaanacccananttccccnacttttttttggaaaaaaatgtgccccggctaaaaaaaaaaaa

SEQ ID NO: 543 - DNA, 819 bp, Triticum aestivum
  misc_feature (389)..(389): n is a, c, g, or t
  misc_feature (416)..(416): n is a, c, g, or t
  misc_feature (515)..(515): n is a, c, g, or t
  misc_feature (524)..(524): n is a, c, g, or t
  misc_feature (541)..(541): n is a, c, g, or t
  misc_feature (559)..(559): n is a, c, g, or t
  misc_feature (570)..(570): n is a, c, g, or t
  misc_feature (580)..(580): n is a, c, g, or t
  misc_feature (585)..(585): n is a, c, g, or t
  misc_feature (613)..(613): n is a, c, g, or t
  misc_feature (621)..(621): n is a, c, g, or t
  misc_feature (629)..(629): n is a, c, g, or t
  misc_feature (666)..(666): n is a, c, g, or t
  misc_feature (685)..(685): n is a, c, g, or t
  misc_feature (694)..(694): n is a, c, g, or t
  misc_feature (701)..(701): n is a, c, g, or t
  misc_feature (703)..(703): n is a, c, g, or t
  misc_feature (712)..(712): n is a, c, g, or t
  misc_feature (726)..(726): n is a, c, g, or t
  misc_feature (743)..(745): n is a, c, g, or t
  misc_feature (752)..(753): n is a, c, g, or t
  misc_feature (758)..(759): n is a, c, g, or t
  misc_feature (768)..(768): n is a, c, g, or t
  misc_feature (772)..(772): n is a, c, g, or t
  misc_feature (785)..(787): n is a, c, g, or t
  misc_feature (792)..(792): n is a, c, g, or t
  misc_feature (794)..(794): n is a, c, g, or t
  misc_feature (801)..(801): n is a, c, g, or t
  misc_feature (806)..(806): n is a, c, g, or t
  misc_feature (811)..(811): n is a, c, g, or t
  misc_feature (813)..(813): n is a, c, g, or t
  misc_feature (815)..(816): n is a, c, g, or t
  misc_feature (818)..(818): n is a, c, g, or t
ggaagaaataaggtgcagcgcctcatagtgtacccccaccaccaccaacgctacactcacaagctaacctcaccatttcaggaagcatatgagcagcgaaagcttgggcaagaactccaagatcatgggtggccgtgaaagaaaagaagttaatagcaccgcaaagcattttgttgatttcacagaagcagaggaagatcttgttttcagaatgcacaggcttgtcgggaacaggtgggaacttatagctggaagaatccccggaagaacagcagaagaagtagagatgttctgggcaaaaaggcaccaggaccaatgaaaatgaaaacaggatgcatgcagtaaaactagattgacatataggatgcacatgtccatcaaaaacctgnggtggatctactcgtctatcttctagncatgctaaaagcaacttggttctgtccaacatgggatgtacataagaaacctcaagaaaaaggaggaacatgtgctaaataacaaaaatatgaattcgntttgtccangattattctacatttcnactaatacatacatgttnaatggcccagngctattaagncccanattgccaaaaagagacctgggtgattcntaactttngttttggnggggactaatccaatgtaatcctaacatgcttaaganaattccactgcagaacatnggggatgcntctgggnanaagattttnttggcaaataaaanatgctgtgtctggaaannnaccgctnnagganngctttaaanttcnggaaagttcgttnnnaaatnangtaaaanctccngtccnangnncnt

SEQ ID NO: 544 - DNA, 620 bp, Triticum aestivum
  misc_feature (303)..(303): n is a, c, g, or t
  misc_feature (367)..(367): n is a, c, g, or t
  misc_feature (387)..(387): n is a, c, g, or t
  misc_feature (400)..(400): n is a, c, g, or t
  misc_feature (404)..(404): n is a, c, g, or t
  misc_feature (511)..(511): n is a, c, g, or t
  misc_feature (583)..(583): n is a, c, g, or t
ctagtctcgagttttttttttttttttttaatgattgatgatccatatatgtttgggctactagtttcggccatccaaaaataaacgagcatattggccaaagtactactactgttacagtttacagtattactagtacatcactagcgcgatcgaactagctcaggaggagtacatggatggattgctagtcccctactactgtacatgcatcaatggtacaagtacaagcggccggccggggcgccgggccggcggatcaagaaggacggcacgacgccgtagccaaagtcgagcaagtangaggtggaagacggcacggcatgggcctccgcgtccaatcctcgccgtcggcgtcctggtcggncgcttgggcgaagcggcctngaccgcggccgcnatcngcgtagccttcctggacgcgtacggatggcttctcgaacggcgtcttcctctctcccggtacgcataacctcgcaacctgcctcccggtcacgccacggagcccggnacatcaatacccatgtcaacggcaactgctcaatcaccctgctcggggccccgttagcggcattacctgcgnttggcggtaatcattcaggggccgtacattcccaatt

SEQ ID NO: 545 - DNA, 643 bp, Triticum aestivum
  misc_feature (300)..(300): n is a, c, g, or t
  misc_feature (313)..(313): n is a, c, g, or t
  misc_feature (316)..(316): n is a, c, g, or t
  misc_feature (337)..(337): n is a, c, g, or t
  misc_feature (348)..(349): n is a, c, g, or t
  misc_feature (370)..(370): n is a, c, g, or t
  misc_feature (373)..(373): n is a, c, g, or t
  misc_feature (380)..(380): n is a, c, g, or t
  misc_feature (392)..(392): n is a, c, g, or t
  misc_feature (402)..(402): n is a, c, g, or t
  misc_feature (413)..(413): n is a, c, g, or t
  misc_feature (416)..(417): n is a, c, g, or t
  misc_feature (426)..(426): n is a, c, g, or t
  misc_feature (432)..(432): n is a, c, g, or t
  misc_feature (438)..(438): n is a, c, g, or t
  misc_feature (442)..(442): n is a, c, g, or t
  misc_feature (445)..(445): n is a, c, g, or t
  misc_feature (461)..(461): n is a, c, g, or t
  misc_feature (470)..(470): n is a, c, g, or t
  misc_feature (479)..(480): n is a, c, g, or t
  misc_feature (510)..(510): n is a, c, g, or t
  misc_feature (521)..(521): n is a, c, g, or t
  misc_feature (533)..(533): n is a, c, g, or t
  misc_feature (591)..(591): n is a, c, g, or t
  misc_feature (625)..(625): n is a, c, g, or t
  misc_feature (630)..(630): n is a, c, g, or t
  misc_feature (635)..(635): n is a, c, g, or t
  misc_feature (642)..(642): n is a, c, g, or t
cgtcgatcgaccatggaaggaggaacgctcatggtctctccaccgagccggcctagaaagtgggcacaacgccgcagctggagtcggacagtgcggctgcggagaagtactggtccacctcgaggtcggcgtcggcgcgcttggcgaaccgccccttgatccgtggcctgggtctcggcgtaggccttccgcgacgcgtacctgatggtcttctcgaaccgcctcatcttcctcttctccctgtaccggtgcaccctggctccctgtccatggcatgcccatgaactgcggcgacatttncgccgccgctganaanaagtcaaagctgtctcgctgnccctcaatgtnnaactggcaaatcctgaaaggngcnacgttgnccgggtaagatncatttaaaantggaaatatanttnnaaacaattnggaaanatggantcanganattccaaggttactangtggattanagggatganncaagtttgattcaaaatataaaacggtganttaaaggtgtncagacgagacanatgcaaaaaatatcaaatagaataccagtcttgatgtccatctacatgtaatttacanaacccgctaacctcgtagatccacgttcgaaaanttgtncttgntaactgnt

SEQ ID NO: 546 - DNA, 387 bp, Triticum aestivum
cggcggttccagaagaccatccgctacgcgtcccgcaaggcgtacgccgagacgcgaccgcgcatcaagggccggttcgccaagcgcaccgccgaggacgacgcgctggagcaggacgggccgttctcgcccgcctcgtcggcgcacctggcgtcggagggtgactacggcgtcgtgccgtcgttctgaggagaccggcgacggcgactcggctgtagttttggcgcgagcatccatccgagcgcgcgcgcgagcggtggctcctgcgacgcgcgatccgtgtaacattgaataatctgtacagttttgttccatgggattagtgctgtgaccgtgccgacctgatgtacactcactgttttcttctccaaaaaaaaaaaaaaaaaa

SEQ ID NO: 547 - DNA, 705 bp, Triticum aestivum
agggcgcctttgcattttgtgccagaagagacataagaagagagggaaaaaaaggaagaacaagcagagcaaaaaagagaagacacaattatgtggcagacaggtacagatacatctcacatgttcttggcttcttctttcttatgtatataacaagatgagacttgggactgactgactggaaaagagaagatcacaaaccaaaatgacttcactgatcaggagatacagacttagacttaggacagagaatatgatacagggatgagcaagcaaggttataggtattttgattcttgcataacatttagtgcatcctctcctcagctcctgttcttgcatttctccattgcccttggtgcaaggccaatagcttctgatcccttcattatccgaaggcgcttgcacgactcgacgaacatctcccacgggacgtcgccaacgagcatccagtcgccgtccttgtcctcgtacgtcggaacatacttcggatccattgagcagatccatcagcttgcttctcgttcatgccgttcatccctggagttccacagtttccgatggtgaaggagctgaacatcttctcgagggccttggagaggtcctggtaggtcttgtacatgtttgaggtccaccttgcgcaggtagggcgcgccgtccatgctcaccttgacgaacgcagctgccgccgccggcgacgacttc

SEQ ID NO: 548 - DNA, 684 bp, Triticum aestivum
ggcacgagggccgcggccgccgaccccgagaagccacctgtctcccaaggcacaggccgtgggttggccaccagtccggtcgtaccgcaggaacgccatgaccgtccagtcggtgaagatcaagaaggaggaggagaccgagaagcagcagcctgctgctgccgctgctgctggtgccaacggctccaactttgtcaaggtgagcatggacggcgcgccctacctgcgcaaggtggatctcaagatgtacaacacctacaaggacctctccattgctctgcagaagatgttcagcaccttcaccgcaactgggaatgaggggaagatggttgaggcagtgaacggttcagatgttgttactacttacgaagacaaggatggagactggatgcttgttggagacgtcccatgggagatgtttgttgcttcatgcaaacgcttgaggatcatgaaggggtccgaagccatcggtcttgcaccaagggccaaggacaagtacaagaacaagagctaaagatggggcagtaagaggaagactatgatgccacaaggatggtgttcttgcagtgtgctatggtttcttagatatataatgttttcaattattagctggattaaaagaagggagagttgccatgtttaatttgttggtggaccagaagcaataatctatctgtgtgtagc

SEQ ID NO: 549 - DNA, 643 bp, Triticum aestivum
  misc_feature (538)..(541): n is a, c, g, or t
  misc_feature (608)..(611): n is a, c, g, or t
  misc_feature (613)..(617): n is a, c, g, or t
  misc_feature (638)..(639): n is a, c, g, or t
  misc_feature (641)..(641): n is a, c, g, or t
  misc_feature (643)..(643): n is a, c, g, or t
gcacgaggaccagaggcagcattcgcagcagccgcagcagcacaagaagacgacgacgcagccacctccgacgcagagctcgagactcgagagaggctgacgacgagggcgacgaagccggtggccatgtcggcggagacggagcggagctccacggagtcctcggcggcgtccgggctcgacttcgaggacaccgcgctcacgctcaccctgcgcctccccggcgaccccgaccgcaagcgcggcgcctcctcctcctcctcctgctccctcgccgaccgctcctccctcctcgccgaggctccgccggcccccaaggcgcgggtggtgggctggccgccggtgaggtcgttccgcaagaacgcgctcgagaacgtcgccgccgggtccaccagggcggcctgcgcgccggccaagttcgtcaaggtggccgtcgacggcgcgccgtacctgcgcaaggtgaacctgcgggactacgccggctacgaccagctcctccgcgcgctccagggcaagttctgctcccacttcaccatcnnnnagttcgccaacgacgagatgaagctggtggacgcggtgaacgggacggagtacgtgcccacctacgnnnncnnnnncggcgactggtgggctggccnncngn

SEQ ID NO: 550 - DNA, 511 bp, Triticum aestivum
  misc_feature (378)..(378): n is a, c, g, or t
  misc_feature (386)..(386): n is a, c, g, or t
  misc_feature (398)..(398): n is a, c, g, or t
  misc_feature (421)..(421): n is a, c, g, or t
  misc_feature (491)..(491): n is a, c, g, or t
  misc_feature (495)..(495): n is a, c, g, or t
cttcggatcatgaaaggatcagaagccattggcctggcaccaagggccatggagaaatgcaagaacagaagctgaggagaagaccgacggacggaagcttgcatctcagcaccaccaggggtggatggatgcaagaagaacaaatctccatggcttttgaagctctgctcgtctctgtatcatactcgtcgtccctgccctccagcctctgtatctccctgatcaatgaatccttttggtgtgtcaactgttctctccgtgcccacttgtcaagtgaaagatcatcaatgtccatcaatctcacttgtcctatacagaagagaaaccatgcatgacatgtacctgtccctatacatgtcttttttgctactgttttcncttctccnctttttttgggnaaagatcaaagcacctgccctgntaaagcctttgcacataactgttgatatatacatggtgttcattggacaataacgttcagggtaaaaaantgtnttataaaaaaaaaaaa

SEQ ID NO: 551 - DNA, 613 bp, Triticum aestivum
  misc_feature (431)..(431): n is a, c, g, or t
  misc_feature (480)..(480): n is a, c, g, or t
  misc_feature (535)..(535): n is a, c, g, or t
  misc_feature (546)..(546): n is a, c, g, or t
  misc_feature (557)..(557): n is a, c, g, or t
  misc_feature (560)..(560): n is a, c, g, or t
  misc_feature (568)..(568): n is a, c, g, or t
  misc_feature (588)..(588): n is a, c, g, or t
  misc_feature (609)..(609): n is a, c, g, or t
cgagtttttttttttttttttgtaaaactaacattgacagacgtggagttctttacttgcgtagcagcaaaaacatgtggtacagaccataaggcagaattcttcttgaaactgttagacgttttccggcttccacaaagatccctacagtcactggatatctccctcttgctctggactgtaagaagcaaccattctagttgcgattcttggacttatcagctgcccttgggagcaagtccaattgcatctgatcctttcatgatcctgagcctgcggcaagagtcaagcgaacatctcccatggtacatccgccaacaagcatccatctccatccttgtcctccgtaagtcagaacatattcacatccttggggtaccaaataagcacccttgccagtactgaagccactgaacacctctcaagcgcantcacaggcccttgtagtcctggaatccttgaggcatctccctgaggtangggcgcaaccatgctgacttgactaaagaacccggtccgctggctaaaacccctncggcctcaacngggtgggaaanacngtctcggnaactcgtggggcacccaccnacttcacgggggggtccgaantttt

SEQ ID NO: 552 - DNA, 444 bp, Triticum aestivum
  misc_feature (330)..(330): n is a, c, g, or t
  misc_feature (354)..(354): n is a, c, g, or t
  misc_feature (395)..(395): n is a, c, g, or t
  misc_feature (406)..(406): n is a, c, g, or t
  misc_feature (430)..(432): n is a, c, g, or t
gcgatgctgatgatgtggtcactacttacgaagacaaggatggtgactggatgctggtcggcgacgtcccgtgggagatgtttgtcgactcatgcaagcgtctgaggatcatgaagagttctgaagccataggtcttgcaccaagaacgaaggataagtgcaagaacaagagctgaagaagatgcagtgttaaagatgttgcccattgtatcaagaagaatggtccccttgcagtgcgctgccgttttttttttcctactaagaaatataacgcgttttaattactaagttggagggagacctgtcttgttcaactcgttcaaggaccangagcaataatatatccgtgtgtanctggattggtgttaagtcatgtcccctaccgtgtctcccanaatcacttggngattttatccaatgtggtaatcannnaaaaaaaaaaaa

SEQ ID NO: 553 - DNA, 578 bp, Triticum aestivum
  misc_feature (260)..(260): n is a, c, g, or t
  misc_feature (310)..(310): n is a, c, g, or t
  misc_feature (326)..(326): n is a, c, g, or t
  misc_feature (334)..(334): n is a, c, g, or t
  misc_feature (367)..(367): n is a, c, g, or t
  misc_feature (371)..(371): n is a, c, g, or t
  misc_feature (381)..(381): n is a, c, g, or t
  misc_feature (388)..(388): n is a, c, g, or t
  misc_feature (393)..(393): n is a, c, g, or t
  misc_feature (410)..(411): n is a, c, g, or t
  misc_feature (413)..(413): n is a, c, g, or t
  misc_feature (434)..(434): n is a, c, g, or t
  misc_feature (443)..(443): n is a, c, g, or t
  misc_feature (474)..(474): n is a, c, g, or t
  misc_feature (477)..(477): n is a, c, g, or t
  misc_feature (495)..(495): n is a, c, g, or t
  misc_feature (524)..(524): n is a, c, g, or t
  misc_feature (552)..(552): n is a, c, g, or t
cgctggtgaaggtgagcatggacggcgcgccctacctgcgcaaggtggacatgggcacctacaagagctaccaggagctgtccaaggccctggagaagatgttcagctccttcaccatcggcaacgactgctcgcaggctcaggggatgacgggcatgaacgagagcaagctggtggacctgctcaacggctccgactatgtgcccacctacgaggacaaggacggcgactggatgctcgtcggcgacgtcccctggganatgttcgtcgcgtcctgcaagcgcctccgggataatgaagggatcagaanccatcggtctgacacnaggggcantggaaatatgcaagacaggagctgacgtttgcnacanttcaaattanggtctgnttccnaactattaacatactanngngcgtctctacttccattttanctgttgtanatatgtgtatatgtcacgtaaaaagattcancgnatgcactgtttttagtanatcaatagttttcgttacaccaaaaaggnaaagatccttcattctatcaaaagacancagtgggctaccacaaaaaaaaaaaa

SEQ ID NO: 554 - DNA, 748 bp, Triticum aestivum
  misc_feature (424)..(424): n is a, c, g, or t
cgacctcgtgctgaagctggagccggcgtcggcggccgcgccgccgtccgaggacggcgagcaagtggccgacggcgtcgcggaggcgcagccgtctccggctgctgccgacgggcagttgaagcggtcgccgagccagagcagcgtggtcaccaccccgcagccggacgcggaccccgagaagccgcgcgcgcccaaggcgcagcggtggggtggccgccggtgcggtcgttccggaggaacatgctggcggcggcggagagaggggggggcggcgctggtgaaggtgagcatggacggcgcgccctacctgcgcaaggtggacatgggcacctacaagagctaccaggagctgtccaaggccctggagaagatgttcagctccttcaccatcggcaacgactgctctcaggctcaggctcangggatgacgggcatgaacgagagcaagctggtggacctgctcagcggctccgactacgtgcccacctacgaggacaaggacggcgactggatgctcgtcggcgacgtcccctgggagatgttcgtggcgtcgtgcaagcgcctccggataatgaagggatcagaagccatcggcctcgcgccaagggcaatggagaaatgcaagagcaggagctgaccgtttgctaccatttcaagattacgactcttgcttgcccaactctgtaccataatatactacgtactcctacttcctatgttttatcttgttgttacacatgtgtag

SEQ ID NO: 555 - DNA, 663 bp, Triticum aestivum
gcacgagcacatcgtcttctcctctcaccgagccagagctatcacatctcgtcattcacatcgcatccaaacgtacttgcaaagttcgctagaccaagcaagcaccaagcatcttcgcacgtacgtccactggaaatggaagctaccgacagcctcctcatggccaccgagctcaggctgggcctccccggcaccgacgacaagccacacaagatcacctcggtgatgtcgccgccggcgactcccagaggcaggaagcgcaccctggacgccttcgaggccaccgcctccgatgaggccgacaggtccgacgacgtcgagaccgcaccccccgtggccaaggcacaagttgtcgggtggccgccggtgaggtcgtaccggaagagctgcttccaggcggcggcgagcaagagcaaggcgaagaaagcagacgaggccagcagcaacaacacgccgtccgcagcggcgccggcgagcaccaacggctccttcgtcaaagtgagtatggacggagcgccctacctaaggaaggtcgacatgaggatgtacaagggctaccgggagctcaaggaggccctggagccatgttcgtctgcttcttcggggcagacggcggcgctttcaacgggggcgcgaacccggccgagtacgccataactacga

SEQ ID NO: 556 - DNA, 657 bp, Triticum aestivum
  misc_feature (13)..(13): n is a, c, g, or t
gtgggaacgaggnagatgaagctcgtggacgcggtgagcgggacggagtatgtgccgacgtacgaggacaaggacggcgactggatgctcgtcggagacgtcccctggaggtgaaatttttgggccttttgtgctatttacagttaaaatccgcatgccgctgaatctcgtgttgctcgtcagctatgtccctttgtttaagttcatgtatacactgcttaattagggtcatgggttgaatcgctaactgatcaggtgctatagcatctcaggttcagaaatctggatggtttggtgagcgtacgctgttagtttcagtttatctttgcttgagaaacgattaatttgggtttaatgggttgttgatctggtagtgatatataaggaactcggacccggtgtctgaacatgaaaatttattaaactgtaccaagggatcacgagattgctcctggttttcactactatgtgatgttccttttgggttatcagttggctattgtctgtttaacttaggatccatgccaattgttcttagttagcctgtatattctgtatgagtcgtcgatcctgctagttaaacagacatctcgaatgatgctcataaattaatttcacatgcgtgaattcagctgttcagtttcttggacatgatta

SEQ ID NO: 557 - DNA, 596 bp, Triticum aestivum
  misc_feature (13)..(13): n is a, c, g, or t
  misc_feature (47)..(47): n is a, c, g, or t
  misc_feature (52)..(52): n is a, c, g, or t
  misc_feature (68)..(69): n is a, c, g, or t
  misc_feature (89)..(89): n is a, c, g, or t
atacaatacgatnaacactaatgacaaacaattacacatgatatatnccggntcaccagcgctacaanntctccctgttttcttatagnaatttcatcgctacaccatcatcatcatcacaccaaaacatgtatttacacatccttgatcccttgacccggccacctgatcgaccttaattaccctgttttactctgtcatcgtccggaaaacatgcaagcacgcacgcacctacggcgcggctctgaatgcctacctcttctcccttggacccagcgagatggatctcttcgtcctccgctggccagcagatggatggattactacgtacgtacgtactaacttcttctgcgccatcatcgatctctctctgcttccgccattgctacgtgatcgagcacagtttagcttatggcggactcgcgcgggcgggccgcccagagcgtgctgagcgcgcgaaggcgctggaagtagtcccccagcacgagcaggcccttggccgcctgccgcgtcgtcaggatcctgtgcatgttctgcagcgtctccagccggagatggtccgcctgctgcacgaagccgacgaggcccttgagctt

SEQ ID NO: 558 - DNA, 495 bp, Triticum aestivum
ttttttttttttttttttgagcaaccaaatggaacaattcatatgtattcaccatgttcaaccaccacacggacaacagctaaaatacacggagcaccgattctccagccactacagttctgtgacacaacttaattaggactcgtcctggcttacctagtttttattcccaacacagttctacaaccattgtaacttacaggctccccccacctacttgtataccacctgagtacaaaccctggacccaaaaagcagctacacataattatacaagaaaaactcgaatacccaaattatctgcagcaatatgaagagcacccccagcgttgtacacatcagcttagggggaaatccggcgagcgatgatccttggttattccctgggcctagcaagccacagagagctcagcgcgcgcaaacgcgagaagtagtcgtgtatggctaggagggcgcgggaggcctgacggatcgtcctcgtgccgaattcctgca

SEQ ID NO: 559 - DNA, 2204 bp, Triticum aestivum
gaattccggcgacggcggcagtctactaccccgtagttcggatagaggcccctcttcctatcgagtgtttaggcatatatctgcagctttgtcacaacaaaggaatctctctgggagttacattgagcactatgaataatctgcaatggcagaggccagccctagaacagaaacgtcaacagatgatactgatgaaaatcttatgcttgaaccagggaatgctgctcttgctgttgtttctgactctagtgacagatccagagacaaaaacggagatcaaaagacaatgcgtcggcttgctcaaaatcgcgaggctgctaggaaaagtcgtttgaggaaaaaggcatatgttcaacaattggagaacagcaggctaaagcttacccagctagagcaggagttgcaacgagctcgtcaacaaggcatttttatatctagttcagcagaccagtcccattccatgagtggaaatggggcgttggcttttgacacggagtacgcacggtggttggaagaacacaatcgacaagttaatgagctgagagctgcagttaatgctcatgcaggcgatactgagctgcgtagtgttgttgagaagatcatgtcacactatgatgagatttttaagcaaaaaggaaatgcagccaaagcagatgtctttcatgtgttatcaggcatgtggaagacaccagctgagaggtgtttcctatggcttggaggtttccgaccttctgagcttttaaagcttctttcgacccagcttgaacccctaactgagcagcagctgtcagggatatgcaaccttcagcaatcatcacaacaagctgaggatgctctttcacaaggaatggaggctcttcagcagtctttggcagaaacgttggctgggtctatcggctcttctggatctggatcaacaggaaatgtggcaaactacatggggcaaatggccatggccatgggaaagcttggaacccttgaaaatttccttagtcaggctgacaacctgcggcagcagactcttcagcagatgcaaaggatcctgaccacaaggcagtctgcccgtgcacttcttgtgataagtgattactcatcccggcttcgtgccctaagttctctttggcttgctcgaccgaaggaataacaagcgcgtgtgatttgactgcaatacattttcgcaatttgggggtgatggtggtggcagtcatgcaacagacttgattcagagaaacttgcacatactataatccaaagagatgctgtgttcaggtagcttagccatatagtgaagttgagtgcattagggaagggtccttgttgtaccgttaaccgctgtaaaattggcatctaatggttgccaagtaatctttaagatactaatttgcagagagccatccctttagatgtgcatttataactcttttgttgctaatcggaaaaaaaaaaggaggaagagcgagctaggcaagaggctatcgcgaaaaaggctgcagaagacaacaaggatcagccctcaagctctaccgatgctattatggctgaagcggaacttaccttaaatgctcctgctgatcttgacgcagatctactcaaggatgatgatgatgctcagctactacagcaagcacttgctatgtcaatggatgagggtgcttcaggagctgcagccgtggctgatgctgctatggcagaagctgctgcagatgaccaggatttggcattggctcttcaaatgtctgtccaggacgctgaggcggctggtcaatctgatatgagcaaagtgtttgaagacagatcatttgtgacatccatccttaattcgcttcctggtgttgaccccaatgacccatctgtgaaagatctactggcatctttgcatggccaaggagagcaggaggagaagaaagataaggaggacaagccagacatttctgaagatgggaagaactgaaggcaatgaacatctattttctcggaaaagtgcaggcgcatgaagtgaagaagattgcctgcattagctgcttttacactcgggctctatgaatttacttaatcctcttgtaactgcgttgatgataactgccgagagaacttgtattatgtctgctctcacgaatgctccttcatgtttgtcttaagtgattacatgttgcaaattcatttgtacactttatgtctgttgaaggtgaaattgaacggaattc

SEQ ID NO: 560 - DNA, 1505 bp, Triticum aestivum
tggagagtaggcgaggaggaggagggccggcagcggccgcagcggcggcgggcgacccgcgcgggccgatgccgggtttcggggctcctcagcacaccatcccaacaaatgtgaacgtcatgcagccttctcgagttgctgatttgggggcgctcgcccactctgctggattcagaatagaagatctcgctaatttcagtacaaataatttattcaatctgaagccaaatacacatgcatataccagtgacccccttcagtttggaaattacggaaagtccatttctccgactgatctagctactacggcggcggcagcagcagcggtaacagcagttgatcctcaggccctactacagcaaaagggagtgcaaccaaatctagtagctttaagaactcataacaatgataactggggagagtcaagtatggctgatacaagtcctaggactgatacatcaacggatccggatatagacattgatgaacgcaaccaaatgtttgaacaaggacagcttgctgcccccacagcttctgattctagcgacaaatcaagggacaaattagatcataagtcacttcgccgtcttgcccaaaaccgtgaagctgctaggaaaagccgtttgagaaagaaggcatatatccaaaacctggagagtagtagattgaaacttactcaactagagcaagagcttcagcgtgctcgtcaacagggcatcttcatttcatcttcaggggatcagtctcagtcagcgagtggaaatggagctgtggcatttgacatggagtatgcccgatggttggaggaacataacaagcatataaatgagttgagggctgcagccaatgcacatgctggcgatgatgatcttcggaaaattgttgatagcatcatgtcgcagtatgatgaatttttcaggctcaagggtgtagcagccaaagcagatgttttccatgtgctgtcgggaatgtggaagacccctgctgagaggtgcttcatgtggttaggtggcttcagatcatccgagctccttaagttactggcaggtcaactagaacctcttactgagcagcagcttactggcatatgcaacctgcaacagtcttctcaacaagctgaggatgctctttctcaagggatggaggcattacaacagtcacttgcagaaaccctagcatctggatccctgggccccgcaggatcttccggtaatgttgcaagctacatggggcagatggcaatggccatgggaaaacttggcaccctagaaaacttcctccgacaggctgataatctgcggctccaaacccttcagcagatgcaacgcatattaaccactcgccagtctgcacgagctctgcttgcgataagcgactacttctctcggctacgcgctttgagttcactttggcttgcccgtccacgggaataaattgaatcgattcataaatagcataataatattaggtactgcatcttgagtgttgcattagccagccccata

SEQ ID NO: 561 - DNA, 808 bp, Triticum aestivum
cagctaaaataagtttattacaatatgctatacagaacagaacacgtgaaactacaacactcattcacatcacaacaaccagtttccatacactcattcacatcacatcaaccattttaaccatcaaatcttgcatacccatgaacttccgcttatgtgtagacctacaggaagggcatctctccagcatcatctctcgtaaccttcagcgtctcatcatcggtcatgataggtgtgctggtaggtggttgacgagcctcccttcttgtcatgcttggtcatgatctcacaatgttgccaacaaggcaagaacttccttgatcttatccttgatgttctctagctccaggttgtttcgctgcagctcaatatttgatgccgtgtgtgtacatgcatcagggcatacatacaatgttcaagttaatattctcaacaaactatgatgtaaccaaaataattacttcaggacttaggataaaaattgagcttagacatgaaactttacagcgctcatttcaaccatgttagataaacttgaggtaaattagcaataaggatattggttacaagctaggtgaagtgcaaacaaagtcctattatattgatgtatcccaacttgtttaaactagagcagatcgttcaacttgtgcaatctagcattctaaaaagagagaagtatgttcatttctcagttacacattaactagaacaaaaatgagagacattaattagaaaagaaataagagacactaatataagcaagaactttcaacaagtacacattaattattacatagcatctctagca

SEQ ID NO: 562 - DNA, 614 bp, Triticum aestivum
  misc_feature (540)..(540): n is a, c, g, or t
ttttttttttttttttttttttttttttttttttcacggctcataaaaattccttgcctcaagtgtggctagaaccaaacacctacctaacttgatcaaacttgcctaaggttagatgtgacaaatggctaggaaccaaacagcccctacatgttacgacctccctcgccgccctcgtgttggcgatgtatgtatttacacgagcagcggcggcggcggctccgttcccggctcgccggagccggtcgcgtcctcgtcgttggtcaggcggtccggttcccgctggtttttctgtgaggttttgacggaggcggcagaggcaggaaggcagcaatgccggaggaaagtacggtggtcgaccaccgcaagaaaatttgagccgcgcggtgtcttccgatgtggggattaattgatgtccctggtcggcgatagctcgaggatccggccggagagcgcggagacgagcgccgccttgaagctggggtccctcgtcagcgtcatggccatctgctccgccaggttgcgccggatcagctcggnacgccgccacggccgactcgccgctgacggcggccgctgccgcttcctgcttgtgctgctgctgcgggtggtga

SEQ ID NO: 563 - DNA, 727 bp, Triticum aestivum
  misc_feature (31)..(31): n is a, c, g, or t
cttattactgttacattacataggacatggnaggacgaggacgacgacggcggacacttactgaaacataataataaacacaacatatagcagcaaactacgccttggtaataatcctcaaggcagcagccaagtagggtagatcttcttcctcttgccagccacagctcagctccgctcctacaggggatcctcaattattgacccaatcatcaccggatcgatcagtactggagcatgtgcgtggcggtggcggcgatgggcatggcggtggcagggtacgggatctgccacggccggagcagggggtcgtcgggcgggcactcctcctggatgtccatggcgacgccgctgaactcctcgacgacgcggagcaccagctcgtccaggtgctgctgcttccgcagccgcgaccgccgcgccgactcccggttcgacagccgcctcttctcccgccggttgtccccggccgagaacgtcgcccccgagtcgccgtccgagcccgacagcctcccacctcccggcgacagcgacgacgacgacatctttgcaccggaatcactactacctggctactgctgctgctgctgctacggttcttatttatcacttgttgacgcaggaaaaggaaacaagaagaagaagaaggaggaaatagtttactgctagcgacggcggatttgagagggccaattatgagatacataaaaagtagtagaggaagaac

SEQ ID NO: 564 - DNA, 631 bp, Triticum aestivum
ttttttttttttttttttttttttgaacatgatatttaatgtttcatatatactcgtgccacccatccacccactcgtcgggctttagatccaagtcccgagccacgagttcaatatgtaattacattgattgcatgtatgcactaagcaaagctaaaaatgaaaaattacataggcgacattggattggtacgatagcatctcgaccgcgcgatctccctactatgcccgttgcttgtatgagacggaagcctgacgaaactcgataataatggtgagatcctgacaatcttgaacagcttgcagtcgatgacaacaatgccatctcgatcagcattcttcacgcctgtagcgttcagtctgatgaagaacagcacagcacttctacggtacatgatcctccatctagcaacgtccgtccatgaggtgtgttcgctttggtcttcggagttcacatacagtacttaccacgcattcagctgctaatcttgcagaactgggcgcgacgcgccaattcaaaataccagtagtagcccatgcgctgtaacatgactacatgtgactcaccaatgagcagcagaccgattgctgcactcaatgcttcaaagcatctcaaaagaatggtggcaat

SEQ ID NO: 565 - DNA, 597 bp, Triticum aestivum
ttttttttttttttttttttttcaaagtcaacacgagaaatcattaaccacgaacaaaaatctggctgctcaatctgattttcgaggggaacagctcgtacttatatcacgaggtacacaacgacggtttttctgttccagatgttctcccatctatcttttaccttagggcagcaaaacatcctcagccttcgagcattgccttggctgcatcaatcagtgcaggcctgaagctatcaaaggctcggccaaggacagtgtagccctccttgtcttcaatgtcaacatcggcaccatgtctgatcagcagaagggcaacccctctgtcctcacatatgacggcatgcattaaaggtgattgtcctagcttgtcaactgcatcaatatctgcgccttcttcaagcaggtattcacacagctcagcatttccagtactcgcagctctatgcaggggtgtgcagccaaacttatctttcttgttgacatttgcacgatgagctatcagcgtttcagcaatgttaagccttcctttactagcagcatagtgaagagcagttcggccagcatcagtagtcaaatcaacatttgcaccgtgac

SEQ ID NO: 566 - DNA, 657 bp, Triticum aestivum
agtatctgaagaaataaactggggtcaagaaccactcccaggagtatttgaatatccagcaaccattgatgtttctgatcaacgaaacgtgattgttagccaacaaagccaagacattattacaattgatcatattacccaccttgcaaagcaaaaagagtggtactcatctgggtgttcagagcaatttctgggaagttcaggatctggtggatctgtgcttaaggcagctgatgcaaatacaacacctccaaattatgcatattttcatgggcagaaaaacagattgagttctttcaatgtggatgaactttgcagtgataatttaccttgttcagacactactccaaccaagtcaaggatgcgctggacacctgagctccatgagaagtttgttgacgccgttgacaagcttggtggaagtgaaaaagcaactccaaaagcagtccagaaagttatgaaggttgaagggctaactatataccatgtaaaaagccatctacaggcacttcagcagagagaagcaaccacatggatgaagtttgctcccagaacatgaaacacatggaggctagtgaagggctaagaactcagattggcttgcagaagcaacttcatgcacagcttgagctccaaagaaagatgcagctgcaagta

SEQ ID NO: 567 - DNA, 756 bp, Triticum aestivum
cttggttccaggttcggctgatggtttatcagattacagggataacatccctgcttctggtagtcagatccagaacggcggtcctgctgtgacatctgatgtggttgctaaacaaaatgaatggtgggcagaaataatgaatgatgattggagagatattctagatgcaacggctgctgatccccagtcaaagtccatggttcagccttccaattcggctgcatcacagcctgctgtcaaccagccagcttcatctcatggtggagagatttgcaatgtagctagtcctcccaatagcaactctgcagccaaacaacggatgaggtggactccagaactccatgagtgcttcgtagactctgtaaataagcttggtggtagtgaaaaagctactcccaagggtgtgctgaagcttatgaaagttgacggtttgacaatatatcatgtgaaaagccatctgcagaagtaccgaacagctcgctataagccagacctaacggaaggtacagcagaaaaaaggactaccaccgaagagttgactctagacctgaaatcgagcatggatcttactgaagcgctgcgccttcagatggaagttcagaaacgtcttcatgaacaacttgagacccagagaaagctgcagttgcgaattgaagaacaagggaagtatcttcagatgatgtttgaaaagcagtctaaatccaatactgagaaggtgcaggatctatcctcgggagctacaacaaccctattatc

SEQ ID NO: 568 - DNA, 715 bp, Triticum aestivum
ttattgctatttggacatattggaggtttgcatgaaatcctaggcatcattaaaactgcctgaaacgagaccacaactcgatagatgaaggatcactcgctccgttccatgttgtttgaggagcatcaggaaagatggcttgtatacatgtgcctgcgcgcctttcagctaaacaaagcaacaacatcaaggtccttgcacggtacaccatgtctaagatactagagatggtcagcagctctgatggttcatcttcctcctacttatgctttcgggaaagttcaaaattcacaacttctttaatccgaggacgggtatttaacatcagatgcaggccattggagataggatgtaaaatgaagtgtcgcatagatgtgccgctgctggctgatgttgtctcttgcatccctatgctggtaggtaagattctaacatgatttgtgcgggtcgcggtgacgtaatctcgacgagaagaaacgtgaacttccatgtcctgtcggagctgtctttgaacatctccgcaaacacctttccagctccatgcggccctcggatatgaaagcctacctccacatgttcaacaccatcctcatctgtccaaaccctgttttggatgcgctgccgagctgcacggtttctggattccgtaccataaccagttatagggtaaccaattttggctgtaacctggctatcactctgaactcttgctaga

SEQ ID NO: 569 - DNA, 745 bp, Triticum aestivum
  misc_feature (26)..(26): n is a, c, g, or t
  misc_feature (711)..(711): n is a, c, g, or t
gtggggctgctcggccccctttttcngttccagccccgaatacaacaagaacacgcccgatccatccatggatcgatttacacacggccacgcacgcacggcgcagttaaaggctccagctgtgcactgcacgcacgcacgcacgggcggcagcagcttcagtggtcatattgctcgtgcatgtggcctctgctctgctgcccgtcccgttggcggtcagatgattgatggctaggcctaggccagctagctggacaaacaaactcgggccgggtggctcttcaggaggctggctggcgatggcatcaatcacatttggtaggcgtcctgggacggcctgatgctgaggtcctgcgagtgcgagtgcgaggagcccatggacgggtacgccatctgcgcaacgtgatcgctgaacgggccattcaatgcgtgggccatctgtgaatgggatccatcttttgctcctagttgcgcttgcatgattcttctgaacacgtccgagttcgccatggcggcggcgcctccctgcatcagccccggctgcgacagctgcagctgcgggtgcatcatctccggggagaatcccatcgacgaggaggacaccccagggaagcgaagaagatcctttgagagaagcccttctatgttgaggtcaagcctcgggtttactgtcgccagcttcatcgataagaactcgacttgtctttgcanggactgaacatagttgatgatctcgtcgagcatc

SEQ ID NO: 570 - DNA, 756 bp, Triticum aestivum
cggcacgagggtgatggacttcttcccgcatgccgaattccagtcccactgcaccgacatcccctacctagtcggcggcggcgaggatctgagtcctctagacagcaactgtgcaccagccggaggtgaagaagcagcaaatgatcatacacctgtgactaacaagaggaagtccagagctgccaccacggcatcaaagaaggccaagaaggctggcaaaaaggatttcaccagcaacgacatcgaaggcgacgaaacctatgtcatcgatcctcaaagctccagcagctgcacctcagaagatggggatctggatggcaacgccaagtcgagctcgaaaaagacgggcaccagagccagccgtggagcagcaactgatcctcagagcctctatgcaaggaaaaggagagagaggatcaatgaaagattgaaaaccctgcagaacttggttcccaatggaacaaaggttgacatcagtacaatgctagaggaagcagtggagtatgttaagtttatgcagcttcagattaagttgttgagctccgacgacatgtggatgtatgcacccctcgcttacaatgggattaacgtcagcagtcttgagatgcacatcgctgctctgcaaaaataaataccactctggagatgtggcactagctaacaccgaactgcatagggattaattgattctggtccttatatatagttccaatcattatacatgtataatgtaactatacttgttttgcttcatac

SEQ ID NO: 571 - DNA, 648 bp, Triticum aestivum
atgtgattactgtagtcgccggctggccctgcctgcattcaatgacatgaacgggccaaacagggcaacctcagcacagaatcgagaaccggccgttttcaggacatgaagaaaccaaggaaaggtgatctggtatttcactcgccgtagaaagcttgggggtcctgcctatggctgctgctggctccccccatctgcaccatgctctggaggtcttgctcccagctgaaagtgccttctagctctgccccgtggctgtggccggccgcgacggcgacgggtgaaccggcgtaggagaagccgggcactgccatctctttggacgggatctgctgctcgtcgagctccaactgaggattcatggtcgacaacttcatggacagaaactcgacctgacgctgcagcgactggacgtagttgatgatctcgtcgagcataagtgccttgccggtgatcttgttgcagcttggcaccagggactgcagcagcttcatcctctcaccgatcttctccctcctcaccctctcggcgaggctgtgactatcggttgcctgccccctcctcgccctcacatggatgtagtccttggccggctccgccttctcctcctccaccgcgcctgggttttcgtcgttgctgccgtcggcg

SEQ ID NO: 572 - DNA, 380 bp, Triticum aestivum
tttttttttttttttttttaaatgcactttgccatattttctaaggtatggaaattatttcgctcagacagccataactgaacatatcaacccaaataaccatcacccactcttaaacctcacttttataataaaatccactaactcgtgttcaaattgaaccagtaatcgacgccgccttggcaggccatcaacaaaggacaagggcggaaatgaccttcctatcttagtgctagtaccacctgcttatatactggacccacccttcatgccgggctctaccacaatggcggcacataaaatatatcagaataatgtaccaccatttatgttcttcaagcatggcggtgtgagcttttcagtggagccagacacggtga

SEQ ID NO: 573 - DNA, 154 bp, Triticum aestivum
ggtgtgttagcagaacgaagcgccggatccgtcgttgttaattactgtatctcatgaccctgtgatcgacgacggtgtatcgtcggcgtagtgctgttgaactgaaactgtatataggacaaagatggattgcccgtcgccgttaaaaaaaaaa

SEQ ID NO: 574 - DNA, 704 bp, Lycopersicon esculentum
atggatcaacagttaccaccgacgaacttcccggtagattttccggtgtatcgccggaattcaagcttcagtcgtctaattccctgtttaactgaaaaatggggagatttaccactaaaagtcgacgattccgaagatatggtaatttacggtctattaaaagacgctctaagcgtcggatggtcgccgtttaatttcaccgccggcgaagtaaaatcggagccgagagaagaaattgaatcgtcgcctgaattttcaccttctccggcggagaccacggcagctccggcggctgaaacaccgaaaggaagacattatagaggcgttagacagcgtccgtgggggaaatttgcggcggagattagagatccggcgaagaacggagctagggtttggcttggaacgtacgaaacagctgaagaagctgcaattgcttatgataaagctgcttatagaatgagaggatcaaaagcacatttgaatttcccgcaccggatcggtttgaatgaaccggaaccggttcgagttacggcgaaaaggcgagcatcgccggaaccggcaagctcgtcgggaaacggttccatgaaacggagaagaaaagccgttcagaaatgtgatggagaaatggcgagtagatcaagtgtcatgcaagttggatgtcaaattgaacaattgacaggtgtccatcaactattggtcattta

SEQ ID NO: 575 - DNA, 347 bp, Lycopersicon esculentum
ttttttttttttttttttacaaataaaaatacaaatacagtattaataaaatcaatcgtcttcactcacacgggaagcatcgtagcacaaaatacacttctaagtaattgcctaattatatattacttatcctataattaaagaacgcaaaaggtaaaaataaaaaaacttattcactcaagccagttggtatctgtacatgcagttattaagcttctttatttagcttcaactcgacgatctcccaggtgttcttggagctaatcctatagcctccgtgctcttcatcaatctaattctcttacacgtatcaacaaacattttccatggaacatctcctacaagca

SEQ ID NO: 576 - DNA, 262 bp, Lycopersicon esculentum
tgtaagatcctttcgaaagaatattttgacttctcaaaagcttgatcgagagaatgataatattttggtgaaggtgagcatggatggtgcaccttacctcaggaaagtggacttaaacatgtacaagagttatcaagaattatttgatgccttaaccaagatgttcaattccttcactattgtccaaggaatgaaagatttcatgcatgaggggagactgatggaccttttgaatagttctgattatgttcctacctatgaa

SEQ ID NO: 577 - DNA, 298 bp, Lycopersicon esculentum
  misc_feature (227)..(230): n is a, c, g, or t
agtgagatcattcaggaagaatgtaatgactgttcagaaaaacaccaccggcgccggcgaaatctccggcaccggcaccggcgcagcctttgtgaaagttagtgttgacggtgcaccatacttacgtaaagtggacttgaagatgtacaaaagttaccaacaactctctgatgcacttggcaaaatgtttagctcttttactattggaaattgtgggactcaaggannnnaggatttcatgaatgagagcaaattgatagacctcttgaatggttcagactatgtaccaacttatgaa

SEQ ID NO: 578 - DNA, 454 bp, Lycopersicon esculentum
tgatgtcccctgggagatgtttatcgatacttgcaaaaggttgaggatcatgaaaggttcagatgccattggcctggccccaagggctatggaaaagtgtcggagcagaaattagcctatctacacatgattaaagctatccatccagcatttctagtaggcgaggaagacacaaaaacgggtgaagagctcataaacttgaatcctttttaaaggcatgaacagtagctggttgttggtcttggatagctcagcatgggtagatgctttacctgattacgacatggtgttcttttatatttgcgtaatatatgtcctcttttaagttttttttttatcatgtctatttaaaaaamcgtttgatattggagtttgtctgcaaactaatgtgtgttgtgtactgagagctcttctagaggtaatttagtaatgttctaagtgaaaaaaaaaaaaa

SEQ ID NO: 579 - DNA, 1363 bp, Lycopersicon esculentum
gaattccgggcttttagagttttgaagtgggaaaaaaaaggtttcttgaagacttagctgttgttggctttaagtcggaaggcaatgaattcttcaacatatactcaatttgttgcttctaaaaggatgggtatatgtgatccaatccatcagattggcatgtggggagatttcaaaggtagcagtttcccagatagcttgattcttgaagtcgagaattgcctcgagaatgagatgcctattatggagaaaagactagagaatgagatagaggaaccatcacaagtgacagttggaacgtctaacagatatgaacctgaaacaactaaacgtattgataaggtgcgtagacgccttgcacaaaaccgcgaggctgctcgtaaaagtcgtttacggaagaaggcctatgtccagcagttggaaaatagtaaactgaagctgcttcagctggaacaagaactagaacgtaatagacaacagggtttgtatgtaggtgatggtttagatgctagtcagataggttgctctggaaccgcaaattcaggaatagcttcttttgaaatggagtacggccattgggtggaagagcaagatagacaaacagatgatttaaggaatgctctgaactcccaaatgggtgaaatagaattgcgcattcttgtcgaggattgcttgaatcactattttgatctctttcgcttgaaagctacagccgcaaatgccgatgttctctaccttatgtctggcacatggaagacatcagctgagcgcttcttcttgtggattggggggtttcgcccctccgaacttctaaaggttctcacgccacatgtggaaccattgtcagatcaacaaatccaggaggttagcaacctcacccagtcttgtcagcaggcagaagatgcgttgtcccaaggaatggtaaaactccatcagattcttgctgaggctgttgcagctggtacactaggagaaggagttatccttccacagatgactgctaccattgagaagttggaagctctagttagatttgtaaatcaggcagatcatctccgccaagaaacccttctacagatgtcctgcatactggctccgcaccaatcagctcagggtctccttgccttaggagattactttaaacgtcttcgtgctcttagctcactttgggctggacgtctttctgaacctgcttaaagaggtaagaaagaacctgtgggttttcaactttgccaatcaaagctgtgtgagctaagtaacaagtatgagttggcgctcatttgaaatgtgtatataagttctggtatgctgtaattgaaacattttcttttgttatcacattggttttgatgattgtaaatca

SEQ ID NO: 580 - DNA, 714 bp, Lycopersicon esculentum
atagcaaacatggcagatcaatcaaatggagcgggcgccagtgggaccttagcatttgatgcagaatatagtcgatggttagaagaacacaacaaacacatcaatgaattgagaaccgctgtcaattcacatgcaagtgaccctgaactgcgaagtattgtgaataatgtcactgcacattacgatgaggtctttagggtgaaaggaaatgcagccaaggcagacgtattccatgtcttgtcagggatgtggaaaacccctgccgagcgatgttttatgtggattggtggcttccgcccctcggaacttcttaagcttctagtcaatcagttggagcctctgaccgagcaacagttagctggcatttacaacttgcagcagtcatcccatcaagcagaagatgccctttcacaaggtatggaggcgttgcagcaatccttggcagagacattagctaacggatctcctgctactgaagggtcatcaggagatgtagctaattatatgggtcagatggcaatggctatggggaaattagggactcttgaaggttttctccgtcaggcggacaacctgcgtcaacagacattgcaacaaatgcatcgcatattgacaaccagacaatcagcccgtgctcttcttgcaataagtgaatacttctcacgtcttcgagctctcagctctctttggcttgccagaccacgagagcaataa

SEQ ID NO: 581 - DNA, 936 bp, Lycopersicon esculentum
caaatacctcataaatcactagaaaaaaaaactaaaattcaaagcgaaatggatcaacagttaccaccgacgaacttcccggtagattttccggtgtatcgccggaattcaagcttcagtcgtctaattccctgtttaactgaaaaatggggagatttaccactaaaagtcgacgattccgaagatatggtaatttacggtctattaaaagacgctctaagcgtcggatggtcgccgtttaatttcaccgccggcgaagtaaaatcggagccgagagaagaaattgaatcgtcgcctgaattttcaccttctccggcggagaccacggcagctccggcggctgaaacaccgaaaggaagacattatagaggcgttagacagcgtccgtgggggaaatttgcggcggagattagagatccggcgaagaacggagctagggtttggcttggaacgtacgaaacagctgaagaagctgcaattgcttatgataaagctgcttatagaatgagaggatcaaaagcacatttgaatttcccgcaccggatcggtttgaatgaaccggaaccggttcgagttacggcgaaaaggcgagcatcgccggaaccggcaagctcgtcgggaaacggttccatgaaacggagaagaaaagccgttcagaaatgtgatggagaaatggcgagtagatcaagtgtcatgcaagttggatgtcaaattgaacaattgacaggtgtccatcaactattggtcatttaaaaagccgaatatttctccgaacgcaaaatactatatgatttttccaaatttattgtaaatacgtaatactctatgataacggagaaaatagaaagttgaattggaaaaatattgtgatagggttaatccaaagttgtaaaaagtttcattttcattaatattaatttacgtaattgattgaaa

SEQ ID NO: 582 - DNA, 545 bp, Lycopersicon esculentum
gcaaatactcataatgtatcaacttcccacttctactgagttaactttttttccggcagaattcccggtgtattgccggagttcaagtttcagtagtctcatgccatgtttaaccgaatcatggggtgacttgccgttaaaagttaacgattccgaagatatggtaatttatgggtttctacaagacgcttttagtatcggatggacgccgtcaaatttaacgtccgaggaagtgaaactcgagccgagggaggagattgagccagctatgagtacttctgtttctccgccgacagtggctccagcggctttgcagcctaaaggaaggcattacaggggcgttagacaaaggccatggggaaaatttgcagcggaaataagagatccggctaaaaacggcgcacgggtttggcttggaacttacgagtcggctgaggaagccgcactcgcttatgataaagccgcttttaggatgcgcggtactaaggctctattgaatttcccgcatagaattggtttaaatgagccggagccggttagagtga

SEQ ID NO: 583 - DNA, 722 bp, Lycopersicon esculentum
  misc_feature (697)..(698): n is a, c, g, or t
ggcttatgatacggcggtctattatctaatatgcccttcggcccgattgaattttcccgagttgttagttggtgatggtgggcttaatgatttgtctgctgcttcgattcgtaaaaaagccatagaagttggtgctcaagtagatgctgtacagaactcgcttgcaacccatcataaccatacagaggaaaaggtgcactctgagacggcaagcccctcagaattgaagccttgttggtttcaagagaagcccgatttaaacttgaagcccgagcccgaagatccagaagtggattactggtaatatttagttaatatcgatattaccaataacagtatctctactagtgtaatttttaattatttttttggctttttgttggttgggggaagaggaagtgctttggtaagaatacaagcgccgctccaggttgtgtagcttggtagcctaggattgttatattcttaaaaagaaaaaactatcacctctttctttaattttactttatttttaagaacaaattatcagctgaacagttttggtgttgtaagatgtaaaggggatttgtgttatcattttgtctaatcgcaattctggttgtacttttgcttggttggggtcttttagtggtgggggaaacaaatgttagtgtgaatgatggattatgcatattggtcatcttgaagactaaccaanngtttattatttggggaaaaatgat

SEQ ID NO: 584 - DNA, 634 bp, Lycopersicon esculentum
aaaaactaacaaaacaagtgaatatatttaatttttttcagtatgatggaaggagagaagagaaaacagaggcaacaccagcaagataagccatacagaggaatacggatgaggaagtggggtaaatgggtagctgaaattcgagaaccaaacaaacgctctcgaatttggcttggttcttattcttcccctgttgctgctgctcgtgcttacgataccgctgtattttacttgcgaggtccttcagctaggcttaatttccctgaatgtatagtggatgaccatgaaattcacgatctatcagctgcttctattagaaagaaagctactgaggtaggtgctcgagttgatgctctgcaaactgcgattcacaattctactgttaattctgttgaatcaaactgtaattcgaattctaaatctacaaggatgatgatgaagcctgatttgaatgaatatcctagcccggaaagttgcgacgaagataactgaatctctgcgagttaacagaggccaagagggggattatttttatgttgattagatatactgaggatccatgtatgaaatataatccgaagggattatatgttaatattatcaattatgatagttattaaaggaaatttaatct

SEQ ID NO: 585 - DNA, 468 bp, Lycopersicon esculentum
gtgaattctctataccatgtgttgctagataatggctagttcgctgtttaatgttctttttgtttggaaattgttctcacgatttcataagttgagtcgttcatttcaaaaaaaaagaacattaaacagcgatcttcattcacttccagcttttgccttttcatgggtattctttctctctctcccagtttagctctagattacagggaaacaaaatttttgtaattcagtccctgtaatttcacataataattattatacagtcaaagatggagataggtggtgggggtcaaagtggagttgctgcaaattcaggggtttgttgtggtgggaagagaaagaacgaaaagccctataaagggattcgtatgaggaagtggggaaaatgggttgcagaaattagagaacccaacaagcgttcgaggatttggttgggttcgtattcaacgccggtggctgcggctcggt

SEQ ID NO: 586 - DNA, 831 bp, Lycopersicon esculentum
aaaacacaagaagaagaacaaaggtgataacaataataataaataaatataatggggagaggaaagatagaagtgaagagaattgagaacaaaacaagtagacaagttactttctcaaagagaagagctggacttttgaagaaaacacatgaactttctgttctttgtgatgctcaaattggactcatcattttctcaaccaaaggcaaattgtttgagtacaccactcaacctcacagcatgggtgaaatcattaataagtatctgcaaactactggtgcctcacttccaattcatgatcatagggtggaacaatatgatgaaataacaaaaatgaaaagagaaacattgaatcttgaattaagtcttcaaagatacaaaggtgatgaattgaactcagcacaatatgatgaattaaatgaacttgagaagcagcttgaaaattctattaacaaaattagagccagaaagcttgaactcttgcaacagcagatggaaaacctgaagagaacagagaaaatgttggagaaagaaaatcatgatatgtgtcagtggttgatgaagtatgaaatgtacaagcaacagccagtagcaatgatggagcaacaagaagaagcagcaattactgaactgaatttacttggagaacaaccattgttgtctcaattttcattctttggagatcaacaccaacttggtactacaagtaattcttcagcatatcaccttcaaacttctcacccttttactccctctacctacgattgatgaggaggagctgcaattgctggggataattaattctacatttcctttggcatatttagaagc

SEQ ID NO: 587 - DNA, 605 bp, Lycopersicon esculentum
cctaaaccctcgaattccaaacttcactccgtttcctctattcaaacttcaattcctcaactcacctccttcatttcccataaagacttttcgctcccaaattcctcctcactctctcaacttctcccttcaaaacaactcacagcaaacccatttctctcgagaagacgaagaacatgtaatcggagactgtatagtgtttgaagaaggaattttcgacgacccttttgttcaaaaaccagacaacaaccaaaataagccacaaaacaacaataagaagaaatcaacagaaattcagtccgaaaatttaattcctgaagaatgggttgaagttcagagggaaattaatattactaagaaggaaaggcgtaagctttcacagcaattggagtttgggcaacgtgcggagaggaggaggcttgatttaatgccaattggtagtaacagtaatgtgagaggcagtagtattgaggattatttgaaagcgagagaagaaaaattgaagcaattgaagccgcttgtgcttgaaaacccagatttttctaaggttaaaaaggataagaatgagaagaagatgaagaagaagagtgatgctgaattgagtg

SEQ ID NO: 588 - DNA, 438 bp, Lycopersicon esculentum
  misc_feature (385)..(385): n is a, c, g, or t
tatcttcaccatgtcaccagcagctatcctaaaccctcgaattccaaacttcactccggttcctctattcaaacttcaattcctcaactcacctccttcatttcccataaagacttttcgctcccaaattcctcctcactctctcaacttctcccttcaaaacaactcacagcaaacccatttctctcgagaagacgaagaacatgtaatcggagactgtatagtgtttgaagaaggaattttcgacgacccttttggtcaaaaaccagacaacaaccaaaataagccacaaaacaacaataagaagaaatcaacagaaattcagtccgaaaatttaattcctgaagaatgggttgaagttcagagggaaattaatattactaanaaggaaaggcgtaagctttcacagcaattggagtttgggcaacgtgcggagag

SEQ ID NO: 589 - DNA, 641 bp, Lycopersicon esculentum
caacagtgggatttatgaggcaaatattgctaaaagccctgaaggaaaaatggcagcctgtacatactttagctgcctcaggagagttttaccttctcacctctttgttgaagcatgttgttgatattaatgttccagataaggatggattgacagctatccataaagcaattcttggcaagaagcaggctatttttaactttcttttaagagaatctgcaaatccatttatacttgacaaagatggagccaccttgatgcactatgctgttcgaacggcatccactcacatgataaaaatccttctcttgtataatgttgatataaacctccaagatcatgatggatggacacctttgcatctagctgttcaatcccgtagaaccgatatagtgaggcttttgttaattaagggagctgacaagactctaaagaacagggatggtctaaccccacttgacatatgcctccattctggtcgagatataaggacgtatgagcttatcaaattgttgaaacaacttcccaaggtttcattagttggcttgacctaaaaatgcagctgctaaccacgaaattggcggattggtagttccagctttgagtttggactctgtgtgagttatttctacaacacactg

SEQ ID NO: 590 - DNA, 833 bp, Lycopersicon esculentum
gcagtgctccaactacaagttttttacaacacaaaatagagagaaagaaaagagaaaactaaagttagtccaatgttgaaaaaagagaacagtaacaattgggcaagggtgtgtgacagttgccattccgcaacatgtaccgtttactgtcgggcggattccgcctatttgtgtgcgggctgtgatgcccgcattcatacagcaagtctcatggcttctcgccacgagcgtgtatgggtttgcgaagcctgcgagcgtgcccctgcagcctttctttgcaaagcggatgctgcctcgctttgtgcctcttgcgacgctgacattcactctgcaaaccccttggcacgtcgtcaccaccgtgtcccaattatgcccattccaggaaccatttatggtcctccagctgttcacaccattaccggtggttctatgatgattggtgggaccacaggggaaggcaccgaggatgatggattcttgagtttgaatcaagatgcagatgatacaaccatagatgaagaagatgaagatgaagcagcttcatggttgttgttgaatcctcctgttaagaataacaataagaataacaactatgggatgttgtttggtggagaagtagtggatgattacttggatcttgcagagtatggaggggacagtcaatttaacgaccagtacagtgttaatcagcagcaacaacattactctgttcctcagaagagctatgttgaagatagtgttgtgccagttcagaacggacagcgaaaatctctgattctttaccaaacgccacaacaaccaccaagtcaccacctgaattttcagcttggaat

SEQ ID NO: 591 - DNA, 669 bp, Lycopersicon esculentum
tgcaggaattcggcacgaggctggaatggtaataattgggatacggttgtgacgatgtgccaaggggttggcataagggatgtcatcatcgcaggaggcacaaagtgaggcagcatccgccttgcaaagaaaggctgcaggggcacgctcgcaggcctcacaaacccacacacgcttgtgacgagaagtcaccagacttgctgcatgtatgcgggcgtcacagtctgcacacaaataggcagaatccgcctggcagtaaatggtacagaaatagatacataaagtcctaaggatctgaaagggcctcacacccacaacaaactgagaaatttgtgagctttgtaaaaagtgctgagtttcaggctttcagcgaatggaagagaagaaataggtactaaagtgtcatggatcaagagggacctcaaacttgaaaggtttagccaggctctattgacttctgtggaacaacttcaatgttcttgctgagatagaatctactcttttcacctttatgaattgctccatgatgaattgcttggctcttatgagctgcggaaaaagtgctgatgttcagcaaatggtatggcataaatagattgctaaagtacccatggaatcagagggacctgatccaacttgaaaggctcaggaataactcaaacaatctga

SEQ ID NO: 592 - DNA, 715 bp, Lycopersicon esculentum
tgatcttatctcctcttcttctttttttcttctttctgttatcttttgtaattctgcctcaccatatttagtaaaaaactaaaaacacacacacaaaggaggagaagaacaacaagtcttgtcatatcattgaaaaattcatcaataaaattaaaaaagagaaaaaagcatgaagccaccgaatttcaatcttgaatcggaagacgagtccgaagtcagcagcagccaagttgcctccaacacttctgcccaagaaatttctcctgatccttacaaggataacacgaccaattcgtcctgtctgacaaactctctcaatcttcagcaggagtcgaaagccgttacacttgacttgactcttggcttcaacagcggtgctgataccgagtcgaagggcaatcccgaggctggcagtgaagtagtgcctcatcctccagctgcacaagtatcgaggatattctcgtgcaacttttgtaggcgcaagttttatagttcacaagctttgggaggacatcaaaatgcacataagagggagagaactctagcaaagagggcgatgcggatgggaatgctatcagagaggtacgctagcttggcatcgctcccccttcacggatccccatatcgatcacttggcatcgaagctcatgcctccgtacatcaacgtgcctctcaacaacaagaaaggcatatgcatgctattagaggcggggca

SEQ ID NO: 593 - DNA, 505 bp, Lycopersicon esculentum
tttttttctcattctctctctatatctaatgatcttatctcctcttcttctttttttcttctttctgttatcttttgtaattctgcctcaccatatttagtaaaaaactaaaaacacacacacaaaggaggagaagaacaacaagtcttgtcatatcattgaaaaattcatcaataaaattaaaaaagagaaaaaaggttagtcaaggactggaagtcatcaccgctcagttatttttcgacttgttgttatctaagtatcaaatttgcactgcgttttttcgggagcagcatgaagccaccgaatttcaatcttgaatcggaagacgagtccgaagtcagcagcagccaagttgcctccaacacttctgcccaagaaatttctcctgatccttacaaggataacacgaccaattcgtcctgtctgacaaactctctcaatcttcagcaggagtcgaaagccgttacacttgacttgactcttggcttcaacagcggtgctgata

SEQ ID NO: 594 - DNA, 521 bp, Lycopersicon esculentum
ttcatttaaaatgtcacaagaaaagactcaaccaagatcaaatgaggctcttagagattagcttcagctcgaataacaagcttgattccgatagaaaatttcaacttgcccaagaactagggttgccacctaggcaaatcgcaatatggtatcaaaacaagcgagcacgatggaaaagtcaaagccttgaggttgactataagaccttgcaacaaagactagataatgcccttgaggataatgagaagttgaaattggaagttgagaggctaagaaaagagctaaacaaaaatcaagaagtgttgttgggattcaacaccacaactactaataattattcatcaatttcaagttcttgtgatgaagttgggagtacttcatgtttgcaacttcatgatcaatccaagcataatcatcttgataaggatttttatgcttgtttaattggtgatgaaggtcactttgggacacatgatgggcataatttctttgcttcatctttgtcttgataagctacatat

SEQ ID NO: 595 - DNA, 1034 bp, Lycopersicon esculentum
tttttttttttttttgttactattaactatacttatattatttttgcattttctctctcaatatttttctctctctctctctataatatttgcattgtactactactactacatattgaagaaaaaagagtttgatttttgatggatttgaaagaaactgagttgtgtttgggactacctggtggtggtggtggcggaggtgaattaattcgcgataataataataataataacaaggttaatgggaaaagagggttttctgagactgttgatttgaagctcaattttcatcaagctagtgatgatatttcttgtgctatggagaataataagatgaagagcagtgttactactactaaagaagttgtttgtaacaaagatccaatcaagccacctgccaaggcacaagttgtgggttggccaccagtgagatcatttaggaagaatgtaatggctcaaaagagcaacactgaagaaagtgagaagactactgctgcatttgtcaaagtttgcatggatggtgcaccttacctacgtaaggttgatttgaaaatgtacaaaagttaccaagaactttctgatgctttggctaagatgtttagctcctttactaatggaaattatgggtcccaaggaatgatagattttatgaatgagagcaaattgatggatctccttaacagttctgaatatgtaccaacctatgaagataaagatggagattggatgcttgttggagatgtaccttgggagatgtttgttgattcatgcaagcgtttacgcataatgaaaggatcagaagctattggacttgcaccaagagctatggagaaatgcaagagcaggatctaaggcaattgatggtgtgcaagctccatagataatgcttgaagttgaaggttttgtgagattaatatattgttgttttcatgtgcttgtatttttaattttaattagtatatagttattaattaaagaagtggtctttaatttggacaatatttgtaatgaacatgatgcaataaacttaaaac

SEQ ID NO: 596 - DNA, 702 bp, Lycopersicon esculentum
gagcactatccatacattattaatcccaaaactttgtgtgagtacatctctctctctattttcaatttccataaaccattgcccatatagtattattaatttgtatagtggagaagaaaaacaagtaatggacttgaaaactgagttatgtttggggctgcctggtggtggaggagatcacaatattaagaaaagaggattttctcaaactgttgatctcaaactcaacctccatcataatgataatattccttctatgaacatcaacaatcctccaaaggataattcctccaacaagccaccaactaaggctcaagtggtggggtggccaccagtaagatctttcagaaagaacatgttgtctcaaaaagggaataataataataataataatgaagaaattagtgagaaggatgaaaaaacaatagcatttgtgaaggtttccatggatggtgcaccttaccttcgtaaggtagatttaaagatgtacaagagttaccaacaactctctcattctttgaccaacatgtttagctccttcactatgggtaattatgggtcccaaggaatgatagattttatgaatgagaggaaactgatggatgtcctcaatagttctgactatgtaccaacctatgaagataaggatggggattggatgcttgttggagatgtaccttggcaaatgtttgttgattcatg

SEQ ID NO: 597 - DNA, 900 bp, Lycopersicon esculentum
ttttttttttttttttttacaaataaaaatacaaatacagtattaataaaatcaatcgtcttcactcacacgggaagcatcgtagcacaaaatacacttctaagtaattgcctaattatatattacttatcctataattaaagaacgcaaaaggtaaaaataaaaaaacttattcactcaagccagttggtatctgtacatgcagttattaagcttctttatttagcttcaactcgacgatctcccaggtgttcttggagctaatcctatagcctccgtgctcttcatcaatctaattctcttacacgtatcaacaaacattttccatggaacatctcctacaagcatccagtctccatctttatcttcataagtaggtacatattctacaccatttgtaaggtccataagcttgctttcactttgagaattacagattgttaggcaagtaaacatgttttctaaagcattcaacaacttctggtaactgtcgtacatctccagatctacttttctcaagtaaggagctccgtcaactgctaccttcacgtatttgcacttttctatcacgttttttctgtatgatctcaccggcggccatccaattacttgtgcctttgctggaggtttgtttccggtagagatttcgtttttcgagtgattaacttcgcagatatcacggcggcgttcaccggaagttgagcttcctaggcttaattccataccgtcggaatttccacgttttgcaccggagatttgcttccgcgattcgccgggtaagccgagagttagctcagtttcattgaaattaaggccggaattatttgtttccgtcaaaccgttcgctgatttggctgtctccgatgacattttccccctttttagatagtttggtgaaat

SEQ ID NO: 598 - DNA, 438 bp, Lycopersicon esculentum
gagagaactagtctcgagttttttttttttttttttacaaagaaacttttataaacaaaagtgagaccatttacattttctttcacaagccttggagactcaagcagtaacaatacagaaaaaaaaaagaacaacatactactatggctataaattggaatacttttgcatatattatgaatatatatgtaacacaaatagttatactaaagatttccaagacagaaacactcgaaatcctggcgtcgatcttcaaatccacagatttggtgatctaccttaacatgaataggaagaaacatgtgaatttcgacttctcattgcttatagagaattgattgaatgtttgcagcgaaagtactgcagattctaacgatctttgcacttctccgcccctcttggagctagaccatttgcatctgaactcttcatgatccc

SEQ ID NO: 599 - DNA, 531 bp, Lycopersicon esculentum
gcagaattaaagctagggttgcctggtggagcaagaaaaaatgtttatggtgataatgatacttgtaatgttaatggtaaaagaagctttgtagatttgaagcttaatctttcttctgatattaacaacatcaagaattcaacacacaaaaccccagctgccaaggcacaagttgtgggttggccgcccgtaaagtcctttcgaaagaatattttgacttctcaaaagcttgatcgagagaatgataatattttggtgaaggtgagcatggatggtgcaccttaccttaagaaagtggacttaaacatgtacaagagttatcaagaattatttgatgccttaaccaagatgttcaattccttcactattgtccaaggaatgaaagatttcatgcatgaggggaaactgatggaccttttgaatagttctgattatgttcctacctatgaagacaaagatggtgattggatgcttgttggagatgtcccatgggggatgtttgttgattcttgcaaacgcttgcgcatcatg

SEQ ID NO: 600 - DNA, 723 bp, Lycopersicon esculentum
gagtatgacaagcgtgttgggtgcggagtgtgacaaaatccgattggattatgaagcggagacggagctgaggctcggattgcccggagctaatgggaatgaactggaatcgagtaataagaacaatggcaaaagggtcttttcagaaactgttgatttgaaattaaacctttctaattcaaaggattccacattaatggataatattaatattaatcaagttgataacatgaaggagaagaagaataatattgttgtgccaagctctaatgatcctgctaagccaccagccaaggcacaagttgtgggttggccaccagtgagatcattcaggaagaatgtaatgactgttcagaaaaacaccaccggcgccggcgaaatctccggcaccggcaccggcgcagcctttgtgaaagttagtgttgacggtgcaccatacttacgtaaagtggacttgaagatgtacaaaagttaccaacaactctctgatgcacttggcaaaatgtttagctcttttactattggaaattgtgggactcaaggatttaaggatttcatgaatgagagcaaattgatagacctcttgaatggttcagactatgtaccaacttatgaagacaaagatggtgattggatgcttgttggtgatgtaccttgggagatgtttgttgattcatgcaaacgtttacggataatgaaaggatcagaagctattgggctagc

SEQ ID NO: 601 - DNA, 726 bp, Lycopersicon esculentum
gatttcatccaacagaggaagaacttgttggatactacctcaagagaaagattaattcactcaagattgatcttgatgtcatcactgatattgatctttatagaatggagccatgggacatccaagataggtgtaaactgggatatgaagaagaaagtgaatggtattttttcagccacaaggacaggaaatatccaacaggaactcgaacgaatcgcgcgacgggggccggattctggaaggcaacaggaagagataaagcagtgttatcaaaggagaaaataatagggatgagaaaaacacttgttttctatagaggaagagctcctaatggaaggaaaagtgattggatcatgcatgaatatcgtctccaaacttctcaacatggacctcctcaggaagaaggatgggtagtatgtagggcattcaagaagccaagtccatcaaacaacaattattatatgagaggaaccaacacaagttattcaactagaccacctccatccctttcacaaatgccaagttattatattactaatattaatcctctcaaccaaacatcaaatttcaatcatcaattccctttaaatcatcaaatctcaagccaaaataatattggttatgacaataatcaactactaattcatgaactcccacaacttgatagccctactaccatttcaacaagtttggctacaaatgatcatcaaagccaaaattccatca

SEQ ID NO: 602 - DNA, 1184 bp, Lycopersicon esculentum
gatggatgcaatgggtgatagcgaaggccataggattgtgagctctactgcgttgtggaggggtgaccgccggccagcccaaattgtccaggtatcgcagttggagcaggacattgaacgagcacctcaacagggagaaagtgggcccgtagcatttgatacagattatattcgatggttagaagaacacgacaaacacatcaatgagttaaggaacgctgtcaaatcacatgcacgtgatcctgaactgcgaagaattgcggataatgtcactgcacattacgatgaggtctttaggatgaaaggaaatgcagccaaggcggacgtagtccatgtcttgtcaggcatgtggaaaacccctgctgagcgttgttgtatgtggattggtggtttccgcccctcgttactgcttaagcttctagtcaatcagttagatcctctgagtgagcaacaagtagctgactttaacaacttgcagctgtcatcccatcatgctgaagttgctctctcacaaggtatggaggcgctgcagctatcattgggggagacattagccatgggatctccatttactgaatcagggaatgtagctactacttatatgtgtcaaatggcaatggctatggggaaattaatgactcttgaagattttctccgtcaggcggacagcctgcgtcaactagtattgcaacaaatatatcgcatactgacaaccagacaatatgcccgtgctcttcttgcaataaatgattacttctcaatttttcgggttctcagctctatttggctagccagaccacgagagcaataagcacaaaaaccattgcagtattctgctgaaattcggacactactttgatacactggccagtatatgagatgcagctaagttgctatattttgaagtggtggtactgtatgtgccttgtggaagtacaaaatttgtttttcaaagtatagagaaatttagcaggggtggttgtcatttagatagttttcccaaagtggtgtatattgtgcttttgttccacttctttttgtgtggggtgaaacatttaattttgttgaattaaccttctggactctctaatatatcttgtgatattattttctgtacgaattgtaagaacaattgcttaattttatttttcaaaaaaaagttgatgtaaaaaaaaaaaaaaaaa

SEQ ID NO: 603 - DNA, 1585 bp, Lycopersicon esculentum
cttgggcataactctacccaaaaacctagttcattcggtgagagttgctgaagaccatataaagaaggtcccctatttaattctacatctgcagctaatccagcagtgggatttgacgtctctgggaccatcaataggaatttagctccttcaaatacaagtttgtctactgctgctccaggatctcatgtaatacaattgcaatcaaacttagttcctgcagctggcactcatcctgagaattggggcgagtccaacatggcagattctggttctcgcactgatacttcaactgacatggatggagatgatagaaatcaaaggattgagacgggtcaatccagggctattgcagcttctgattccagtgacaaatcaaaagaaaaagtcttggatcagaagacattgcggagacttgcccaaaatcgtgaagctgctagaaaaagtagactgaggaaaaaagcatatgtacaacagctggagaatagccggttgaagctatcacagttggagcaggaccttcagcgagcacgtcaacaggggaagtacatctcaaacatggcagatcaatcaaatggagcgggcgccagtgggaccttagcatttgatgcagaatatagtcgatggttagaagaacacaacaaacacatcaatgaattgagaaccgctgtcaattcacatgcaagtgaccctgaactgcgaagtattgtgaataatgtcactgcacattacgatgaggtctttagggtgaaaggaaatgcagccaaggcagacgtattccatgtcttgtcagggatgtggaaaacccctgccgagcgatgttttatgtggattggtggcttccgcccctcggaacttcttaagcttctagtcaatcagttggagcctctgaccgagcaacagttagctggcatttacaacttgcagcagtcatcccatcaagcagaagatgccctttcacaaggtatggaggcgttgcagcaatccttggcagagacattagctaacggatctcctgctactgaagggtcatcaggagatgtagctaattatatgggtcagatggcaatggctatggggaaattagggactcttgaaggttttctccgtcaggcggacaacctgcgtcaacagacattgcaacaaatgcatcgcatattgacaaccagacaatcagcccgtgctcttcttgcaataagtgaatacttctcacgtcttcgagctctcagctctctttggcttgccagaccacgagagcaataagtatgacatgcattgcgatattctactgaaactcagatatactacttcgatacactggccggtatatgagatccagcaaagttactcttatgtataaagtggtattgtatgtgcttgtggaagtgcagaatttgttttctttctccttaggtttatagaatgccaaaattttactttgtgacttaggaaccaataatgtacctgtgtttttagttttacaaggaaaaagtttagggatttttaagaagtgtaatagatatttttagaaagttttatgcttaatcaaattatagcttgtgactaaaaaaaaaaaaaaaaaaaa

SEQ ID NO: 604 - DNA, 1614 bp, Lycopersicon esculentum
  misc_feature (1558)..(1558): n is a, c, g, or t
gcttcttggaaataagagatttgacactttgtgaccaaaaagtcaaaattggctggtaagagagagaaggagagctgacaaggtataggacgtcatcccattttagcaactttcacctgcttctcatctgggtacttccggcactgcttgatttattgatttggtgattctaaacttcagttgatttctcactgattcactgaaaagctgagggacacagaagggctaaagaaattgaagggggaaaaaaccccaacagaaaattacaagatttgatgattctattgtcttattttagctttctggcaaagcttgagccttttgctatagacccttttcgtttcttgaactaagatactacatctgatttgtgttccaatttcaattgattatccacaaagttggctatagtccacgatggctgatatcagtcctagtacatcaacagatgccgatactgaagataagaacaggttcctaaatcaacaactgtgtgccgtagcttctgatggaagtgacagaccgaaagatcaaaagacactccgtagacttgctcaaaatcgtgaagctgctcgaaaaagccgtctaaggaaaaaggcatatgttcaacagttggagagcagcaggatgaagctgacacaactagaacaggagcttcaacgagctcggcaacagggaatatttatttcaggttcaggagatcaatcgcagtcgatgagtggaaatggagctttggcatttgatgtagaatatgcccgatggttggaagagcagaaccgacgaattaatgaattaaggggagctgttaattctcatgctggtgatgctgaacttcgcataatagtcgatggaatactggcacactatgatgacatattcaggataaagggggatgcggcgaaggctgatgtttttcacatattgtcgggcatgtggaaaactcctgcagaaagatgcttcttgtggcttggtggattccgttcatctgaactactcaagctgctcattaatcagttggagcctttaaccgaacaacaattattggcgatcaacaacttacaacagtcatcccaacaggctgaggatgctttatcccagggaatggaggcattgcagcagtctttggctgagacactcgcagggtctcttggaccttcaggttcctctgggaatgttgcaaattatatgggtcaaatggccatggcaatggggaagcttggaactcttgagggtttcatacggcaggctgataaccttcggcaacaaacattgcagcaaatgcatcgcatattgacaactcgccaatcagctcgtgctcttcttgctatcactgattatttctctaggcttcgagcactgagctctctctggcttgctcgtccccgggaataacatccgctttcttctaatacactactctaaagacccttggtaacatttgtaaatgagaaacctctttgttggaaagctgagctgctgagttttaatggatacatatatttatataatggtatttgtaacattgtttcatatttaactaagatagtgtgtgatcagngaattgttgttgtattttagtatatctaatggttccagttaggttaatggaaatga

SEQ ID NO: 605 - DNA, 1071 bp, Lycopersicon esculentum
gggggtttcggccatccgagcttctaaaggtactcacaccacatcttgagctcttgacagaacaacaactccgggaggtttgtaacctcaggcaatcgtgtcagcaagcagaagatgccttatcacaaggaatggtaaaacttcatcagattctcgctgaggctgttgcagctggtcaattaggtgaagggaattactctcttccgcagatggggcctgccatcgagaagttggaagctcttgttaggttcgtaaatcaggcagatcatctccggcaagaaacacttcaacagatgtcccgcatcctgaatacgctccaagcagctcagggcttactcgccttgggggagtactttgaacggcttcgtgttctaagctcacactgggctactcgtcttcatgagccggcctaatgaagctatagaagatccctcaatacaccattcgacgagttttgccttcagaaactatactatgtaagctaaaatttagctcttgtttatgtcaataaagctctcaatatgaatataggacattatactagttgtacaaagggtctccaagagtctattgtggcttatgtttccgagcaacttttgaacgcgttggagatgagaaattgatatgtatataacatacgtcgagcaatggcatgactaatatcatgttgtgatttctcgtgagaatgttttttcgaagatttgcatctaaatatttacttttacaggttttggttaggaaagagtgttgctcacttagagagacagatccaggatttgaacttaatgagttcagcctcgcaatgaactcatacaagtaaaattatggatttgatccaagtacgtttgttgagttttttactaggttttaagttttaatcgtatacatatatgaactccgtgacgaaaattatggaccgtgtcaaaagttatggattcagataaacatcgtagccaattggctacgtccgttttgctcgcttggtaattggtagggtgtgcataatcaagtcgatcgaatgttatgtttgtgccatttcttataagtattattatctcactatgtttttgc

SEQ ID NO: 606 - DNA, 1065 bp, Lycopersicon esculentum
ggagagaactagtctcgagttttattgtttttctctgcctctaaattccatttcttttttttcctttcttctttgtataatttcataattcagttttaattattttgaaaaactccaatttgtagaagagtttctttgtacttatgaacagtcaatgaacatgagttctacatcaactcagtttgcccccacgagaaggatgggcatattcgaaccattccaccatatgagtatgtgggaagacgcgtttagaggtgatattatgcccagtgttggtgcgtgtatgatcacaccggcaaatgacagggcagatgacaagtcgggatatacttctagtgaccaacttataccatctggctctgaggataatcaagcaggaaagagtatttcagacaaggtacaacggcgtctagcacagaatcgtgaagctgcacgtaaaagccgtatgaggaaaaaggcttatgttcagcagcttgaaaaaagcaatttgaagctagcacaacttgaaatggaacttgagagagctcgacagcagggactatacattttaggttcaaatggtaatatggggctaagttcaacaattaatccaggaatagctgcatttgaaatggaatatagtctctgggttgaagagcaacaaaaaaagaacgtagagttgaggaacatattgcaatcccatgtaagcgaaatggagcttcagttgctggtagaaaccgtcttaaaccactactacaatctattccgaatcaaagctgatgctgcgaaagctgatgtgttttacttgatgtctgggatgtggagaacttcggtggagcgttttttcctctggattggaggattcaagccatctgaactcataaatatcgtgatgccacagcttgagccattgtcagatcagcagatcgtgaaaatctgtaatctacgacactgttgtcagcaagccgaggatgctctcactcagggaatggataaacttcagcaaactctggcacagaacatcctaactatgaccactggaatgggaagttacagttctcaaatggtttctagtatggaaaagtt

SEQ ID NO: 607 - DNA, 420 bp, Lycopersicon esculentum
tggctccgcaccaatcagctcagggtctccttgccttaggagattactttaaacgtcttcgtgctcttagctcactttgggctggacgtctttctgaacctgcttaaagaggtaagaaagaacctgtgggttttcaactttgccaatcaaagctgtgtgagctaagtaacaagtatgagttggcgctcatttgaaatgtgtatataagttctggtatgctgtaattgaaacattttcttttgttatcacattggttttgatgattgtaaatcaatatggtagaggttattgttactccaagttgtgcctctctttgtctatgatgggagccaagcaattttgaatgctttgcagatgtaacaaaatgagccaatattttattgtgcaaaattaaattcatgtttgcaatcaaaaaaaaaa

SEQ ID NO: 608 - DNA, 841 bp, Lycopersicon esculentum
gcagtttcccagatagcttgattcttgaagtcgagaattgcctcgagaatgagatgcctattatggagaaaagactagagaatgagatagaggaaccatcacaagtgacagttggaacgtctaacagatatgaacctgaaacaactaaacgtattgataaggtgcgtagacgccttgcacaaaaccgggaggctgctcgtaaaagtcgtttacggaagaaggcctatgtccagcagttggaaaatagtaaactgaagctgcttcagctggaacaagaactagaacgtaataaacaacagggtttgtatgtcagggatggtttagatgctagtcagataggttgctctggaaccgcaaattcaaatagcttcttttgaaatggagtacggccattgggtggaagagcaagatagacaaacagatgatttaaggaatgctctgaactcccaaatgggtgaaatagaattgcgcattcttgtcgaggattgcttgaatcactattttgatctctttcgcttgaaagctacagccgcaaatgccgatgttctctaccttatgtctggcacatggaagacatcagctgagcgcttcttcttgtggattggggggtttcgcccctccgaacttctaaaggttctcacgccacatgtggaaccattgtcagatcaacaaatccaggaggttagcaacctcacccagtcttgtcagcaagcagaagatgcgttgtcccaaggaatggtaaaactccatcagattcttgctgaggctgttgcagctggtacactaggagaaggagttatccttccacagatgactgctaccattgagaagttggaagctc

SEQ ID NO: 609 - DNA, 792 bp, Lycopersicon esculentum
ggcattgggaaatgtgcagcattttgagaattggggtgattctggtagtgcagaccatagccagcagactgacacttcaacagatgttgatactgatgaaagaaaccatcagggccaaggtgttcagcatggtgcattaatagctgtggactccatggacctgtccaaagtaaagcttggagaccagaagacacttcgcaggctggctcagaatcgagaagctgctaggaaaagccgattaaggaaaaaagcatatgttcaacagctggagaatagtaggctcaaactgtcacagttagagcaagagttaaaacgagcccgccaacagggcatatttattgctaatggatatgcaggagatcagagtctttctgctggtggaaatggggcattggcatttgacatggattatgcacgttggctagatgaacatcaacgacttatcagtgatctccgatcagctgtaaattctcacaggggcgataatgaactgcgtcatctcgttgatggagtaatgtcacattatgacgaaaaattcaagctaaagagtgtaggtttaaaagcagatgtttttcatatgctgtcaggcatgtggaagactcctgtagagaggtgtttcatgtggttaggtggatttcgttcttctgagcttctcaagattcttggcaaccatcttgaaccgtttacagagcagcagctcataggcatatgtaacttgcaacagtcttctcagcaagccgaggacgcgctatcacaaggtatggaagcccctgcacaattactcattgatac

SEQ ID NO: 610 - DNA, 834 bp, Lycopersicon esculentum
ggacgagcactagtgacactatagacgagctatgacgtcgcatgcacgcgtacgtaagcttggatcctctagagcggccgccctttttttttttttttttttttttttttttttttttttttttttttccaaccaatatagacgctggatagtccttccagcattaatgtacttgtattcttattgctaatacaattgcacaatatgtcaatcatgaatccatgataacttacaagttaaatgcaagctttaccctaacttgtacaacactgaagcgcaatatgagaccagaggatgttaatacaacttgtacaaagagaactgaccctccagccatttgcaaatgcgttgcgagtttgcagccagcagccccacatttacagatcggcccagggagggactccaacgggggtgatgcttcttttgcggcctagcgagccaaagagaacttagggcgcgtaacactgaaaagtagttcgtttattgcaagaagccccccagcggctttgccaattgccaggaagccttgcatttgaagcaaggtttgttttcgaaaattggtaacccgacaaggaaattttcagggggccagttttccaagggccatggcatttccccttttggttggcacgtttccgaaaccccgtggcccaaggaccctcccgtttttgcaaggtttgtgaattgttcatcctttaacaagattctatcttgtgggggttgtggaaatggtccctatatggttttgttggggtaagttttaaaggggtggatttgaaagtggggagtttttttgaaaatccctttgagtcgatttaaaaaaccctcttagaa

SEQ ID NO: 611 - DNA, 597 bp, Lycopersicon esculentum
gcaaaattataacaagttgggatggttgcacatcatgattatttttttgtttgtttggttatatcaagaattgtaaatattaggatttttctgccattaatttgattcaaaattgaatcttgataagattttcttttatcttcttctcacaaaattgaatccatttgggttttttcagttgagctgagattttgctgtttggcctttaaaagtctgtacaaatgaattcttcaacatacactcagtttgttgcctcgagaaggatgggcatatgtgagccgatccatcaaattggcatgtgggatgatttcaatgctagttgtccgagtacatcgacaaccatgattctagaagttgagaaatgcctagaggaccagataccgatgatggacaaaagattagacattgagacagaagatacttcgcatggaacagtagggacttctaatagatatgaagcggaaacaagtaaacccatcgagaaggtacttagacgtcttgctcaaaaccgtgaggctgctcgtaaaagccgtttgcggaagaaggcctatgttcagcagttagaaaatagtaaattgaagctgattcaattggaac

SEQ ID NO: 612 - DNA, 569 bp, Lycopersicon esculentum
  misc_feature (286)..(286): n is a, c, g, or t
  misc_feature (471)..(471): n is a, c, g, or t
gattatacatgttaggttcaaatagcaatatgggactattaggaacaattaatccaggaatagctgcattcgagatagaatacagtcactgggtggaagagcaacaaaaaaagaacgcagaattgcggagtatattgcagtctcctgtaagcgatatggagcttcagttgctagtagaaaatgtcttaagccactatttcaatctctttcgcatgaaagctgatgccgccaaagctgacgtgttttacttaatgtctggggtgtggagaacttccgtcgagcgctntttcctctggattggaggattcaagccatcagaactcataaatgtggtgatgccacaactcgagcccttggccgatcagcaaatcattaaagtgtgtaatctgcgacactgttgccagcaagctgaagatgctctcacacagggaatggataaacttcagcagactctggctcagagcatcctanatatgaacacgggagctggaaattacacttcccaaatggtttcttctatggaaaaattagaagcattggagagctttgttaaccaggcagatcacctt

SEQ ID NO: 613 - DNA, 402 bp, Lycopersicon esculentum
  misc_feature (376)..(376): n is a, c, g, or t
caagaatccaattatgtggtcatcaagcagtgataacaggggactctctgcttcttcttcttcatcttcatcctcatctcattcaccattttctccaagactcaaaacaatggaagaagtgtggaaagatattaatctttcttcacttcaagatcacactacgaattactctagagatcatcatcatcttcatgatcataatcatcaagctgctaattttggtggaatgattttacaagattttttggcaaggccttttgctaatgaatcttcaccagcagcagcagcagcagcagcctcccctgtttcagctacaactatgctgaatttgaactctgttcctgagcttcatttctttgataacccattgaggcanaactcaatcttgcaccaaccaaatgc

SEQ ID NO: 614 - DNA, 918 bp, Lycopersicon esculentum
  misc_feature (18)..(18): n is a, c, g, or t
  misc_feature (768)..(768): n is a, c, g, or t
gaaatgatcagtccgttnctgactcttttttactagttaaataattaataaactttttctatcaacatatatatatggtaattaaaacagctcaattatttgtaaaattaaaggtgtagtgtgataatattacttcacagggaatgaaacatgtgattagtaaaagcaagtggattatggctttcttcttcttcctcctcctcctcctcctcacggagttgatgaattgggtcaaaacttggagagttattagcagtacaggtaactgatccatgcagttgatgatcaaaaatattattagtagtaaagttattgaaattgttgatgaggttaatattgttgtttgaaatagaagaattgtttgagtaacttggctgtagaaatgcaatgtgttggtcttgggaaaaatttggatacgcatttgccattgcatatttgctgttcataaccttgtgttcactattggtagctctgattgaacgatgccacctcttgtttccaaaagaaattgtttgaacaaccaagacagtgtccggagcctactttggcttaaaaggatactaccccccgtttttccccgttttcccatgtgcccaatacttatccaatgttttccaaaccctttgccccgtttaaaccccccccctggttgacaaaggggggaaaaccccctgtttttttttttttaaaagaggaaaaaaggccggtgtggacaacacccgttttttccccccccacttaattttgctttccgggggcaaattattnttttggtatttttaatattagcggggcgcccactcttttctcaaccccttggtggaaaagtatttcttgattctaaatccaatcagggattattttcttctatttctctttttctaccccctcacccccccctgctttttcttaactttt

SEQ ID NO: 615 - DNA, 662 bp, Lycopersicon esculentum
  misc_feature (595)..(595): n is a, c, g, or t
ctactactacctttcttttgatcaacacaaagataacataagttactagtaagcgcagcgcgctagcgcaaagaaagagaagaagtatatacatggagctattcccagcacaaccagacttatctttacaaataagtcctccaaacaacaaatcatcatcatcatcaacaacaacaacaacaacatggaaggctatgagtagtaataataacaatattgatagagatgagatggacttattcttcttgagaagagctttagaatcaaaacctgataacaacaatactctttttgagctttctttatctaatcctaattataaaccttctcatcatactcaactaattaactcttcccattttcatcccctacaaaacacaaatttcatccaccaacaaaatcaacaacaacttaatatcatgagacctataagaggaattccattgtacaatcaaaaccctcttcctcttcctcttcctctttctcatcatcataataactacccaatatttgctcaccaaacctttgaaaatactgctcctacaacaacacctacattacctatacattcttctggatattgtattagtagttntagtaacaatagtaacaaaactatacctaattcctcaccaacaactatcccttttcatcattctaat

SEQ ID NO: 616 - DNA, 908 bp, Lycopersicon esculentum
gatttcaacctttcatatgtaatgcaactaatggatctccttcattcaacattacctttaaccaaagaaaatgtatctcctttgtaaagggtttccccacaatggccatgaatgattgctcggaggtggccaaataaggctaaagaataaggtcccaaggccctaaataagtagaatttgatagtcaaatgtcataattttgattaccatctgaacttgtatcaactgtttgagacaaatgaaataatactgtcaagtgtcaatattcttgtgggcacactagtggtcaagaatgtttatttttaggattaatccaaaaatagtttaattaatccatcagcagcatgtaagtgaagatgtactaatgagtgacatttgtgaagttatttagattgtattcttgaattctacttcttttctctgcatcctgttgagatttgaggttgatgagagttatgtttgacctagattgtcagatttataaggctggtggttcttgatttgtttactactgattcttcaagagttgagtgtggtctagattcactatgataatgataatggtgtgttaacaaggacatgtgaatacttgtcaaaaagagatctggtttgttaagaggggacaaaggtttgtcctgtaaaattcttatgatataaaatgtatttatatttcttttcaaagaaagtggacatcatcttgggactgctgaaagcatgaatatcctttttgggtggaagtgttattttttcgaattatgtcaaacatttcaagtcatcctggagcggaaaaatgtgaaggtttcagtgaagtacataaaatcatgaaattgtttacatcattatggaacctgaattgtgcacatctggtgttgggttgttagtttgattgcacgttcttaatgttcaat

SEQ ID NO: 617 - DNA, 569 bp, Lycopersicon esculentum
gttttcacaaacaccattatccccttcttcttcttcctttttcacaaacatgtccacttaaaaagaagataaaagataaaaatcaaaatctttgctcttcactttttcttcacttaccaccaccttggcttttttttactcttttttccacctaaatctatcatcaagaatcaaacttgaagtttgttcatctctctttttccacatcttgtttatgtgtgtttgcaactttttaccttttatttttcatcaattttggggttttttgaggtattaaagaagaaaaaaagaacaaatcttgaattgtcatataattttgtttgctatccaatatgcccttagaaggggtttttgttcaacaaaactcatcttcatcaaaacaaaccccggatctttctcttcatattagccctccaaattcatcatcatcatcaacacgtacaacacataataatagtttgactgagctttgtttagctcatccaactactaccaataatgaagaaaataagagtttttcaagaaacccttttctccaacaaagcccaaacatgaatagttatcatggg

SEQ ID NO: 618 - DNA, 405 bp, Lycopersicon esculentum
gatggacaacttcacttcatgctagatttgctcatgctgttgagcttcttggtggacatgaaagggctactccaaaatcagtattggagctaatggatgtcaaagatctcactctagctcatgtcaaaagtcatttgcagatgtatcgcactggtaaaactactgacaaacctgcagcttcctcagatggatcaggtgaagaagatttgttagctattgacaagattatggatcaaagaggtccattagatggatgtgatgaaccttctacaactctttggagcaactcctcaagtagtagagaaagattgtcacaagctaactttaatgaatcaaatggactcatcagatcatcctctttcccatctcaacaaagattcagccatcatatagaggaatgtgaat

SEQ ID NO: 619 - DNA, 490 bp, Lycopersicon esculentum
gcacgagataatagtttgactgagctttgtttagctcatccaactactaccaataatgaagaaaataagagtttttcaagaaacccttttctccaacaaagccaaaacatgaatagttatcatggggtttctttattagaccctataaagggtatcccaatttatcatcatcatcatcatcaagatccaaagagatcatcatcatttggatccatttatcataataatttggatcatatatcatattcgaataattcctatgttacaaatgttacttcctcttctccttataatcgaatacctattgtggctaatagatttcaaaatcaacaacacatatattataacggagttggattattaggttcaccttcttctcatgaaagtaataattttttgatgagatcaagatttttacctaaatttccaactaaaagaaacatgagggcaccgcgaatgcgatggacaacttcacttcatgctagatttg

SEQ ID NO: 620 - DNA, 1671 bp, Lycopersicon esculentum
attttccttactttagggtagctagccaagatattttcaagcaaatccttttttcacaaacttctaaatattactaccatactatgtaaagaattttcaaatcgaacaaaaaaaaaaacatgtgatgggtaggacagttaaaacaaatttctagacttcattaacatttggtaaaaaattcaataatttttattcatattatattttcttttacataattaaattaattaaatttcaaaataaatatcaaaaatataaaaaagaaaaaaaccagaatcaaggcttaaaagaataacatgagaattgtttcactcacaaagattttttttttttatgatttttaatatggtatctgatacttatattgaagttcaaacaatttcgatcaagaaggaagaaggattaaaaatatctagaatatcatcccacttaatagtaaaagaatgtataaaatattcattgaaccctcactatacttcctttttagttctcattactctcttgctaatatacctccaatattgcaaacatattaatttgtcctaattctttctccctcttacccatactccaaattaatattaaccctatcttttctcatatatccacaaactcctttattacctttgccaagatcctctatcttcttaactttgacattgactcaaaaatattgttatactcatctttgttgaagaatcaaagcatggatcattttggtaatttaataaaagaagagtttgatggatcatttttgacgcctcaaccgaaggagtgtcttcatgagaatggacctccaccatttcttacaaaaacatatgaacttgtggatgatccaagtaacaacgacgtcgtttcttggagtagaggttacaatagtttcatagtatgggatccccagaatttggccattaattttctaccaaggtatttcaagcataacaatttctcaagctttgtcaggcagctcaatacttatggatttaggaaagtaaatccagaccattgggaatttgctaatgaaggttttctgagagggaaaaagcatctcttgagaacaataaggagaagaaaaccaagtaatttcatcaagtcttcgtcatcaattaataatcaagcatcaaaaggctactaaatcacaacttcaagctatggagcaaaagcttcaagggacagaaatcaaacaagagcaaataatgagttttttggctaaagcattacataatccaaattttgtggagcaaataatgcaacaaaatgataaaaggaaacaacttgaagaagcaatgaagaagaagaggaggaggccaattgattattatgaagctggtcctagtaatataattaagttagaacctcaagatcatgatattattaataatgaatttgatgatgatttacaagtggctatgaacatgtcacatgggaacacattaatcaatttagaagaagaaaataatgaaggattttgggaggatatgctgaatgagaatagtaatgttgaagatgagattatggctttgcttggtgttaataatgaacaagaagatgaacaacttcatgtggatattttctctgattaattaattacttgaataaattatcagccaatttctctggctcatcatgatttaaattttaaaaaaaaaaaaaaaaaaactcgagaggggg

SEQ ID NO: 621 - DNA, 1260 bp, Lycopersicon esculentum
gaaagatggatataattggagaaaatatggtcaaaaagtgacaagagataatccttctccaagagcctattttaagtgttcatttgcaccatcatgtccagtcaagaaaaaggttagtttactactcccttctctctattttaattatcatgcttattaaaaataattaatttaaaatagttatcatttttaaaaattaaatatttattttcaattttacccttgctcaataaataaagatagatattaatgaagtgaaaaacaacataatataaaattaaattaaagtaaaaaagtaaataaagataatttattcaaattatgcttttagttgattctccctcaaatgttgactgaatttatgaggcagtgtacacataaaaatattgaagaatataatttaaatacactttccactattgtctttttcatcggtataacttgtcttctagaaaatatcaaattttattaagaaagagacaaattttgaaaaaaaattaaaccttgaactttgaatactttaattattttaaataataaaaaaagcctaaaattcaattaatataaaatagaggaagtattttattagtggttgtgcaaataaaaacatgacaaatagaagacaaaagatggagttagatggagcttcatgggttcggacgaactcagtagctttttcataaaccctacacttgtattaaaaatttaattaaatatttatgtatattaatttatgaatcactaacaaagttaattgacgtttgttaacaaaatttagaaccccaaaacacttaatccccgcttcggctatgaactagaaggagtaaatgcttggaaaaggatgtgtttactttaatgttcccacctaacataagagtatagaaatgaaataacattactatactaagtatttaattttgtgttgtctaaatttcttttatattaataggtacaaagaagtgttaaagatgcatcaattttagtagctacatatgaaggggaacacaatcatccccaaccacctcaagctgaaataacagtgccattagtgaatacaacagatccaacatttttgaacaaattcatgaaagacatcaacacaaattcagtgcaacaacaatatttagtcgaacaaatggcgtcttcgttgtcgaagaatcctagttttgcagctacagttgctacagccatctcaggattacttttttgaattatatgatgatttaattacctttcaaatgacacaaaattactgtttgt

SEQ ID NO: 622 - DNA, 1042 bp, Lycopersicon esculentum
ggagaaaatcattggcaggaaattttctttttagcatcaagaatagtttaagcaagtggtgatagtaatatataaattatatattcgaagggggaagaaaagtttcagtttttccgagtttcatactccctgtcggctcaacagtgttccccaagatgatacgagttgccgctcaagccacaaattttctatccgtactcgactctgtggtgaagttgctcacgaaagcttcagtctcagaatgctgccttaaaagaaggaaacctcaaatcagatttcatatttttgtgtattggcatgttttgaccaatgaattgattagatgttagtagactgggttgtttcgacttcgtgctgacttcagataagtagcatacatttaatttttttcttatatttatcaagttatctttcagttccttctctcttgtgtcaactcgtcttgtttcgttcagttgattgcttgttggtgattatgaatatgaactgggactatttgttctctcttgtatttagctcgcgatatgacttgaatatgtatgtggatattggtaggcttaccactctgttcttattttggacttccatagcattgttgtcctcgtcttttggttttttttctcgatcggaagtggaaaagttttttttttgttgtggagccgactgtggagagtgtctttatctgtgaattatttgtgatatgatttacataaaatgatcattaaatgatttagtttctgatcatccgaaagaatacgatagtttttctatcttgtatcatttattcgtttcatcttgcctcttataaaactggtagttttcatcctagttcctctaaagttttcacttcaaaattttcttgctttgcttatgtgttattattttagaaatttttttgactctttggcagctgtgatttagtaaaagaattttgcagctttgttcttgttgttgttgttttccttgtgtttgatgctttccccttaggtctcaagttcttgttctttcattgttagaatgattcactgtaacagtagtgatt

SEQ ID NO: 623 - DNA, 638 bp, Lycopersicon esculentum
ggaagaagacaactctaaattattattatcaagaaaaagaaaggctgaagaagattattgtgtgaataattcatacatcaattttgaagaagcatcaccaaagatgccaagagaaatcacaactaatatttcaactgtttgtgttaaaactaatccctccgatcaaacttcagtggtgaaagatggatataattggagaaaatatggtcaaaaagtgacaagagataatccttctccaagagcctattttaagtgttcatttgcaccatcatgtccagtcaagaaaaaggtacaaagaagtgttaaagatgcatcaattttagtagctacatatgaaggggaacacaatcatccccaaccacctcaagctgaaataacagtgccattagtgaatacaacagatccaacatttttgaacaaattcatgaaagacatcaacacaaattcagtgcaacaacaatatttagtcgaacaaatggcgtcttcgttgtcgaagaatcctagttttgcagctacagttgctacagccatctcaggattacttttttgaattatatgatgatttaattacctttcaaatgacacaaaattactgtttgttgagaggattaaattgttattgtattatatattggagt

SEQ ID NO: 624 - DNA, 174 bp, Lycopersicon esculentum
cttatttggacctgttgttctcttattttgatcatgtggctttcttctatttaggccttaaacatgcagcctgcttttcaaaatatgtgcttttacttgataatgtggaagttgttcatccttgatttactcttcaagggaaggcggatggcctgtgggtcagcatagaacata

SEQ ID NO: 625 - DNA, 861 bp, Lycopersicon esculentum
cggaatcagaaaaaggttggtgaaaacaagcagaactatgcagcccaccatttgaataactgggagagtgaagctgagagagaagaggtacagtgcagcgagtggggagatcacgatcattacagtactacaacttcatctgatgatgacgacgatgaagaagaagaagtagaggaaaaggatgatataagatctgggtatgggccatcccgatcgaatttcgggtctactgcttccgtgaagaaatctgataagatgtcggaggacggtgggtcgtcttcgatgagttgggggaacggaaatgggaaagtggagatggtatctgatagaagtatagtggtgaggcacaaggatctagcagagattgttgctgccattaaggaacactttgataagactgcttctgctggtgagcaggtgtctgagatgttggagacaggtcgagctcagcttgaccggagctttaagcagttaaagaaaactgtgtatcattccggtggagtttttagcaccataagctccacctggtcttcaaaacctccattggcggtcaagtatcgttttgaacctagttctattgatgaaggtgggcaaaagagtctttgttccaccttggagcgactcttggcatgggaaaagaaactgtatcaggaagtgaaggcgagggaaggagttaaaattgagcatgaaaagaagttggcaacattacagagtcaggaaagcagaagtgatgacatagccaagttggacaaaaccaaggcctcaataacaaggttgcagtcactgatggtggtcacatcgcaagctgtttccactacgtcctctgccattattggcctaagggactctgaccttgtcccg

SEQ ID NO: 626 - DNA, 641 bp, Lycopersicon esculentum
gcttgttgaactttgtcatggatttatgtacatgtggaaatccatgaaccagttccatcaagttcagaatgacattgtgcagcaggtgcgtggcctcatcaacagagaaattaaaggtcaatcgacatctgacctacaccggcaggcaactcgtgaccttgagtctgctgtatctgcatggcactcgagttattgtcgcctgataaaatttcaaagggactttatccgatcccttcatggttggttcaagctcacccttgtatctgtcaatactgagccaactaatggcaacagggagttctcagattcttttatgttttgcgatgagtggaagctagcacttgaccgtattcctgacactgttgcatcagaagctatcaaaagcttcataaatgttgttcattcgatatatgtgaaacaaacggaggagttgaagatcaaaaagcggactgaatctgcatcaaaggagcttgagaaaaaggcttcgagtgtcaggaacattgaaaggaagtattacaattcattctccatggttggcattggacttcctgatgggggacctgataatggtaatattttagatgtacgagaccctcttgctgagaaaaagctgagcttgcagctagccaacggcgtgtgga

SEQ ID NO: 627 - DNA, 375 bp, Lycopersicon esculentum
cactttcatggcattttttcttcttcttcaccgtctccgcccatcgccgtcgcaacttctttagctccatagcaacaccagtaactgcgccgccggaatagccaccgtcaacggcggagacccatttgattttttttttttgatatttaacgatgggttgcgcggcgtcgaagctagataatgaagatactgtccggcggtgtaaagaccgccggcgattgatgaaagaagctgtttatgctcgtcatcacttagcagcagctcattctgattactgtcgttcacttcgtgttacgggttctgctttatctacctttgccgccggtgaaccactttctgtttctgatcatactcctgctgttctctccgtacgtc

SEQ ID NO: 628 - DNA, 478 bp, Lycopersicon esculentum
ttttttttttttttttttacgaacaagatcaacactgaacatttcaacaaacaaagacaaatcaaagaatgtgctgctcactaacgaaattacacttgaccaaccacctaatcaagcagagaataaagatagaagatatcatgaaaaacaaagaaaagaaaacatcaccacatacgggcggtcctgaaatctataattagtctactctgattacagatagataacctactgttaacacggagtaactaacgaatgaaaaacatagaacatggagcaggccagaaatccaagctgatggtctacaaacactttatttgatgaaccctaattttataggctataatgacacacatcatcaccatcatcatcaacaacaatcgaccaatatgttcctcttgaattccgtggcgtcggcgaatttcccccacgtgtccgtccttttgcaagcacatgcacaggggcacttggttggagtgcc

SEQ ID NO: 629 - DNA, 502 bp, Lycopersicon esculentum
gattttcttgattgattgtgaaatttattgctatgtactatcaaggaggctcagaaatccaagctgatggtctacaaacactttatttgatgaaccctaattttataggctataatgacacacatcatcaccatcatcatcaacaacaatcgaccaatatgttcctcttgaattccgtggcgtcggggaatttcccccacgtgtccctccctttgcaagcacatgcacaggggcacttggttggagtgcccctgccaggtgattttcaggattctaaccgtccttccatccaggaaatttcggcatctcatcatggccttttatcacatataccgtcatccactgtggtttctccacaacaacaaatgaatttcgggtctagtcttccactagaccatcgcgaaatttcaacaaccaatcatcaggttggaatactatcatcatcaccaggagtaaataccagtaatatcgatcatactcgaggatcaggggcattatcgtc

SEQ ID NO: 630 - DNA, 465 bp, Lycopersicon esculentum
catggatatggtaattggaggactcttccaaagaatgctgggcttcaaagatgtggaaaaagttgtaggcttcgttggactaattatctaaggccagatattaaaagaggaagattttcatttgaagaagaggagactatcattcaactccacagtattttaggcaacaagtggtctgctattgctgcacgtttacctggtagaactgataatgaaatcaagaactattggaatacgcatatcaggaaaaggcttttgagaatggggattgatccagtgacacacagtccacgtcttgatcttcttgatctttcttccattttaaaccattcaatttacaataattcatctcatcatcaaatgaacctttcaagattgttaggccatgtgcaacctttggttaatcctgaactcttgagattagctacttctcttatatcatcccaacgccaaaacacaaacaac

SEQ ID NO: 631 - DNA, 329 bp, Lycopersicon esculentum
cctttaccccttttctcacataccaagcccagaaccaatacatgcctgtttccttctctacgaccccttttgctacacaaacaccttactatcaaaccacgacgcaaatgaatgtaccaagcagtactcctactcaattgaatccaagtatggctacctatgccaatgttcccctcttccaactgttctctcagttccaacaatacctcaagagtcaaaccgaagattctgaggaaaagaaaaataagactaaagctccaagacctttcgttaagagagttcgacaaaccagaccaaaggttgttgaatctaaaggagctgttcaatgc

SEQ ID NO: 632 - DNA, 954 bp, Lycopersicon esculentum
gaaaactccaaaacccccaattttaaacattcctttcaaaaaaaaccctaaaattgtttgaattttttgattgatagaaagagaagtgaagatgatgaattgtgagttatgtggtgagaacaaatcaatgatgtattgtgaatcagatcaagctaacctttgctgggattgcgattcgaaagttcattctgctaattttctcgtagctaaacactcgagaaatctcctttgtcattcatgtcaaaattcaactccatggaatgcctctggtccaaagctttctcctactttctctctctgcaattcctgcatccaaaacccagatccaattgaacaaattggggaaacaatcgaagaaaattatcaaaccgaagcggataatgatgaagatgaatacgtgagtactgacagtgaaatcgatgattatgacgatgagaatcaagttgttcctttatcttcttctccgtcgagtgatttctctccctcgccgtcgccggtgcgttcggtgagttcttccggcagttatggagatttatcagctatcggagattacggcggtggcgcgacggcggctgataattcatctccgtggaagcgagtaagggaaagtgattgcctacattttgaggtaattatgtatttaaaagagcggaacaaagctagaattttaagtttataaattatagtttttacgggatagttgattttaaaatataaatacgaagtttacgagttattgagttttgtcgaatgcgtaagtaagattttgtagttccgtctatacatcgacgataacaatatagaaagtttagtctcacgagtgatgtttgagaatagtaaaatgtacatattattagagaggttgttttcgatagacttttgagtcgaatgcatttgacattctttttcttcaaatagaaaaggaaggtgatgtgatttggtatttgatctatc

SEQ ID NO: 633 - DNA, 706 bp, Lycopersicon esculentum
gaacacatcataatctccaaagacctaaagatttacctaaatttgagatagaaaaattgtaaaaatcttttgttcagtgactctgtatgtgtgataacaattattaacaatgaagaaatgtgagttgtgcagttccatagcaagagtttattgtgaatcagatcaagccagtctttgttgggattgtgatgccagagttcacacagccaatttccttgtagctaaacattcaaggattcttctctgtaattcttgccaatcacttaccccatggactggctctggctctaagcttggtcccactgtttctgtttgccagaaatgttttcacagaaataataatgatggcgcagatcaacatcttaatgatcataatgatacggaagaagaagaagatgatgatgatgatacggaagaagacgaagatgatggaagcagtgatggtgataatcaagttgttcctttatcttcttcaacttcagatcaacctaatcctccctcattgacttcaagctcttctagtagtgaagattccactaacagatttaacagaagaagtataattggattttcacctaacagaacagaggaaaatatccaatcccattattgtggcattacaagacctaaagagaagatagaaaggagttcatggagatggagataatcgggatatttacagctcaaaagctaattctgttatctg

SEQ ID NO: 634 - DNA, 462 bp, Lycopersicon esculentum
taatgctggtagatttgcctcgtcaagggacagaactggccaggcacgaactcatggtggtcgatatcagacaaatgcagctgctaagggaggccataatatggatggatctcgcatggtgaatcttaacaggggtattcgtgcttagttaagtggagcatacaaatttttgctgtgagagaacacaacatttgacacacatcccaaataatcatttttcagacctttattttgtagtagtttagaatttcgctagttggtatccaaacaatcgtacaaagtattctgttgaacctttctatagtgaaagtctcatcccattaaactaggactttgttctggtgttatgcacggtaggtatttcctcatattcattcattttaaatgtgttatttgctcgactcatacatgaaactttcaccaaaaccttttttgatttgttaaaaaaaaaaaaaaaaaaaa

SEQ ID NO: 635 - DNA, 754 bp, Lycopersicon esculentum
ttttttgtttgtgctagagaagtttctagaaagtttaacgatgaagaattgtgagctttgtaatggattagctaggatttactgtgaatctgaccacgcgaatttgtgttgggattgtgatttgaaggtgcattcagcgaactttttggttgcaaaacattccaggtcgttgctatgtaacgtgtgtcgatcgccgacggtttggtcagctagcggtgcgaaaattggccggacggtatctgtatgtgagagatgcgtgaatgatgaacaaactgacagagaagaggaagagaaggaggaaattgatttggaagatattcaagttgttccgtggtcatcaactccgcctccacagccggagagttcgtccagtagcagcgatgaatcgttaactgattttttttctttgaagcgaatgcgaaaagatgatgatagtggaactttaacgtcacatcgggaagttaatatgctctcgccggcgacggaggatcatggcggtgacgaagcagctgagtttgtaaagtcatttccggtgaaaatgccttcaaagatccagagaaccggtgagattctatcgggtcgggttgaaaatattggatgttcagcgacggtggagcttatcggaagaattaatcggggaggtggatagctgaagtttgtggacggctaggatttaacagctgctagtctataagcatttatagccgtcagattgactacaaaccactaatttgacgatctgcttttttttttt

SEQ ID NO: 636 - DNA, 643 bp, Lycopersicon esculentum
gaaattgttgctttttttttttgtccatttgaaaaaatacagagaaattatgaagaactgtgagctttgtacgggattggctaggatgtattgtgaatcggataacgcaagtttgtgttgggactgtgatgcgaaggttcattcagctaactttcttgcggcgaggcattctaggtctttgctatgtcaggtgtgtcaatcgcctacggcttggtcggctgccggtgcaaagcttgggaagacggtttctgtatgtgataagtgtgtggatggttactatcatagggatggagtggaagagatggaggagagtgagagcgtgaatgatgaagagagtgatacagaggacgaggaaactgattacgaagaagatgaggacgaaattgattcgggggatattcaggtggttccgtggtcaaatacgacgcctccaccgccggctagttcatctagcagtgaagattcatcaaatggctgtagaaatgtctcttcaaagcgaatgcgtgaagctgatccggatcttcagtcagatgacgacagcggaagttcgtcgtgtcaacggaaagtccatatatcgccggcgatggatgcagacggcggagacgacgcagccgctagtgttgactcatactcatcaaaaatg

SEQ ID NO: 637 - DNA, 753 bp, Lycopersicon esculentum
gctctgtttcttcaaagttcaaatctttttcataaaaatgctgtcttgaactatctttcttttaacttttttccccttctgtgaaactttgaccttttttgagtgttggggttatggagattctatcaccagctccttatctttcaaatccaagctggtttcttgatgagggtaagagcacaaaatggactccagctgaaaataaggcttttgaggatgcacttgccttgtttgataaagatacaccagatagatggcatagagttgcagaaatggttccagggaaatcagttgttgatgtgatgaggcaatataaagaattagaagatgatgtgagcagaatagaagctggattagttactattcctggttatagtacttcaccttttacattagaatgggggaatagtcatagttttgatggatacaaacaatcttatgttgttggaggtaaaaggcctttgtctaataggccaccagaacaagagaggaagaagggtattccatggacagaagaagaacataagttgtttctaatggggcttaaaaagtatggaaagggtgattggaggaacatttcgcgtaactttgttgttactagaactccaactcaagtggctagtcatgctcagaagtactttattagacaactttctggtggaaaagataaaaggcgggcgagtattcatgacatttcaacaataaatctcaacgataatcaaacactttcacccagattaccagaaaccaact

SEQ ID NO: 638 - DNA, 567 bp, Lycopersicon esculentum
taatcaagattctcttgttatgccctttttgtgtttgattaaatgcctgtgagaaattagatagtttaaaaagactcttcatttgtcaatcatttgccaagaaaaccaaaaggggttgataattaggtggtacatgatcaagaaaacatgaatagagaaatgggatatctatcccctgcaacatatatcaagaattcaagctggttgtttgaggaaaacaagggaacaagatggacacctgaagagaacaaagtgtttgaagaagcacttgctttgtttgataaagatacacctgataaatggtataatgtagcagcaatgatccctgggaaaacagtgaatgatgtgattaaacagtacagagaattggtagaagatattagtgatatagaggcagggctaataccagtacctggctatactactagtaattctttcacattagagtgggtcaataatcaagatgcttttcatggatttaagcaattttatggtcaatctgggaaaagaagctcgtcgaatcgatcttctgaacatgaaaggaagaaaggtgtgccatggactgaa

SEQ ID NO: 639 - DNA, 508 bp, Lycopersicon esculentum
tgctgggttattaagatgtggaaaaagttgtagactcagatggattaattatttgaagagtgatttgaagagaggtaacataacctctgatgaagaagctataatcatcaagttacgtgcaactttgggtaacaggtggtctctgatagcagaacatttacctggtagaacagacaatgaaataaaaaactattggaattctcatttgagacgaaaggtggatagctttagaattccaggtgatgagaagctaccacaagcagttgttgaattagctaaaaaaggaacacaagtaaaacatattaccaaacgaggacgcagtagaagaaaaataattactagagtgtcaaattctacgaatgaaaatatcgagtttgatcatattgatgaccagatgttatggcatgacgatattgtgccgatggacgctaactatgaagtgctagatcaagattttattacaaattgtttatgggacgatcaaagagaaaatctcgaaataactgga

SEQ ID NO: 640 - DNA, 460 bp, Lycopersicon esculentum
gatggacagtcaaaactttgtgctagaggtcattggagaccagctgaagatgctaagcttaaagaacttgttgctatttatggccctcagaattggaaccttattgctgaaaagttagaaggaaggtcaggaaaaagttgtagattgagatggtttaaccagttggatccaagaatcaacagaagggcatttagtgaagaggaagaggaaagattaatggctgctcatagattgtatggtaacaaatgggcaatgatagcaagactatttccagggagaacagacaatgcagtgaagaaccattggcatgtaataatggccagaaaatatagagaacaatcaagtgcttataggagaagaaaaatgggacaatttgtttacagaagatcaacaacaacagtagttgaagaagcagataattcaagtggccaaaattctgttaaccactttagtatgaaaa

SEQ ID NO: 641 - DNA, 542 bp, Lycopersicon esculentum
ggctgctcttgcttatgatgaagctgcaagggcgatgtatggtccttgtgcaaggctgaatctcccggactattacgcctcgtcgaaagagtcttccaaggatgattcttcgttgcctactgtatctcgttccgactcaaatacagcatcaagtttctctgaggtgtgccctgctggtgacatgatgagaggaagagccaatgttcctgcggcaagacatgaagatagatcaatagaaattgacggtgctaggactggttctaatgaaattggaacgcctttgagctcattgagagaggaagcggaagacgagaccaaggaggtgtcagataaaagtgagacttttacacctctgagctcgttgagagagcaagcggaagatgaggctaagcaggtgttagataaaagtgagacctttgaaattaaagatgagcctgcggcttgtagttatgattcatgggatatcggacaagaggacctaggtaacttttgtttggatgatgagatgtttgatgtaaatgagctgttaggcatgatggact

SEQ ID NO: 642 - DNA, 701 bp, Lycopersicon esculentum
  misc_feature (664)..(664): n is a, c, g, or t
cccacccccctttagaagcgattttccggccatgttgtccactttcccggccactactctgtccgccgacggacttttttccaatttatttccggcatttgatggaggattcactccttgggaatgtatcgaaccggcttttctattttcacaacaagtggaatcggttgtttcacccaaggaatccccaccacctgaaccggttatttcaaactccgattcaggttctgatgactccaaacctaattctgttcactctagttccggttcagatgacccgaaccggaataataacaataataataagtcgaaccggtgtcctgacgagagaaagcggcagcgcacgacatcgaaccgtgacatggatgagaggaagcgtcgacgtatggtatcgaaccgggaatcagcaaggcggtctcgcatgcgaaagcaaaagcatctggaaaacctgcggaaccaagcgaaccggcttaaagtagggaaccgggaaataatgaaccggttacggttaatcactcaccagtgccaagtggtccagtgtgagaacgagcggctgaggaccgaatcggctatccttcggcaaagactttgagggtatacgtcaaatatggatcaaccggcaatttaattcttattctgcatgggcatgcaataatatggaacnaagacctcattaattaatcattgggaactatataatc

SEQ ID NO: 643 - DNA, 367 bp, Lycopersicon esculentum
atcatcgccaacccgtccatctgtcattgtcatcatcgccaacccttccttctgtcatcatcatcgtccccaactcctccttccttcatcgtcatcgtcccaacccctccttccgtcatcaacatcatctccaacccctcctttcgtcatcgttatcatccccaacccctctttccatcatcgtccccaaaactctagctgttgtcactttcttaagccctagtccgtcccgaatccatggtgaaagttgacattgatgttgcgattgatagccaaggaagagaacgattaagaagttcaactatagaggagcagatctggattgatagccaaattcattgcgaaagtggatactaaatttgtattg

SEQ ID NO: 644 - DNA, 596 bp, Lycopersicon esculentum
ggttgacgagaagtttgagatttaattacaatcatatctctagggactgaaggggttgacttgcatgtgtgtgcatttacttaatctgaatttgtgatttgtggaagaagagaagtttcactataaaaactgattgaaataagtttcttttctcaatcaaggaaaaagtggaaaagagtgagatggaggatcaattaggtggaagatcatcgggagagaatgatcggaatcagcagcaaagaagaatgaagatgccggaaaacaactcagcttcgccagcacaaccaccaccgcagaaatgccctcgttgtgattcaaacaataccaagttttgctactacaataattacagtttgactcagcctcgctatttctgcaagacgtgtaggaggtactggactcaaggtggaaccctaaggaacgtccccgtcggcggtggttgccgtaaaggtaaacgcacaatgaagggcggcggttcatcttcatcagctggtgaaagttcatcatctagatctcatcatcaagtactatatccgccgcagataccgaatttatcagctgctgcagctgcttttttctcaggtaacaattcgaga

SEQ ID NO: 645 - DNA, 748 bp, Lycopersicon esculentum
ttgcgagtgtccaagtccacaatatgtagagtgtcctcttccttttatggagttatggtctaatagccaaagaggaaaaagaacatcaagaaggaaaagctctatgtggtattgaggattctcatcaaattaaaatggatactctctcctaatagaaaagttaacgaacaattaatcatgagggaacttcatggcatttgtagcctaacttgaataagtttcttggattggcttgacctaaatagaaggaagctcgagctacattgcaaaagcttttatcagcttgtgatgaagaaaattgaggatccaacatcccgtcaacagttctattcaaagcgcaaggataccatccttaagaagtccaatgagttggctgttttatgtgatgtggatgttggtcttctaatgttttctccagccggcgaagtgactagctattctagcaaagaacgtcttgaggatgtcatgctccttgctatgaacaaggctggtgaactgaacaagctatctcctgaaaatccaaatgaacaggctttgatggactctctcacacaatcaaaacatgaagccgaaatggtggagaagatagcgattgttgaggctcatgaggagaagcttaatggggtcaaagaaagactaagtgaagcacaacagaaaataaggtattacgaaccacaagtggagagtatcaactctgtccaagaagctgatgcatatgagaagttcattttgagtgctctggaactga

SEQ ID NO: 646 - DNA, 543 bp, Lycopersicon esculentum
aaattcattttgcttcactctaatacactaaactagaagcttctctctaaaactcacatgcagtggatcggaaaaagttccactgctgttttcatctccaaagctaaggcgaaaatattagaatttttcatctaaaagctcccaagctaacttcatgcttctctccaagcgatttttttcgaagtagagtactacggatccaaaagatttcatttcaatctaccaaaatcaagttctagtttgcatcttctcatgggtcgcaataagattgtgatgaagaaaattgaggattcaacatcccgtaaacagttctattcaaatcgcaaggatagcattgtgaagaagtcaaatgagctggcggttgtatgtggtacagatgtggggttgttgatgttttctccatctggtcagctgactacctattctagcaaagaaagtattgaggacatcatgatcgaagctatgaacaagtctgtgaatccgcgacccataccaaatctaaatgaacagcttttgatgcagagtctcaaacagtcaaaatct

SEQ ID NO: 647 - DNA, 642 bp, Lycopersicon esculentum
gcaaagttcattttctctatccctaaaatcctcctttgatatttttctttatattccattgttcatatacatatatacatatatatatattaaagagtggattttctaacgttacatttttaatgggatgaaatcgattgtttctagcaacaacatgaacgcgatatacgttcaaattatgttgctagatcatatcaatacgaaaaaaatgaaacttttatttttttaattgattgtatattattacattcatatatatatattgttcatatatgtatatatatctttctaaattatagaaagatttttttttttataaaaaaaaaaacatgggaagaagtaaattgccattgttgaagattgagagtttgaccaatagacaagtcacttttagcaagagaagaaatggaattctcaaaaaagtttatgaattatctgttttatgtgatgtagatgttggtattataatgttctctccttctggtcgtctcacacattattcgcgtaaaagaagaattgaagatattctttctgagctcattagtctcccagatagtgaaagaggattctacatcaacaataaagagtctgtactttggaacttaaggaagattgaaattgaagataaattttgcgatattg

SEQ ID NO: 648 - DNA, 590 bp, Lycopersicon esculentum
  misc_feature (571)..(571): n is a, c, g, or t
ccgcactgctcttcattatgctgctagcaagggtcaagtgaaaatagctgaacttttgatttcacgtggtgctaagatcaatgcaaaagacaaggtaggatgcaccccattgcatcgtgcagctagcacggggaactctcagctgtgtgaactattagttgaggaaggcgctgaagttgatgaagttgacaaggcaggggaaacacctctgatgactgctgttgtatgcggcaataaagaggtagctttgctcctcataagacatggagcagatgttgacattgaggacaaggaagggtacactgttcttggtcgagcttctaatgatcttcgtccagtattagtcgatgctgcaaagatgatgctcgaaggataaactccacgacctcatgatagctcatcagaaaacgcaagccaactctgtaaatgttcaacctgaagcgtgctcaactagacacataccgatgaatattctggaactatttagttgtagggcagaaaacctaaatgttgtacttaactcttggtgatgctcctttagttatgacaagtgcatccattttagaaaaanaaaaaaaaaaaaaaaaaaa

SEQ ID NO: 649 - DNA, 597 bp, Lycopersicon esculentum
caggatgctcaaggatggactcccttgcattttgctgctactcaaggctatgttgaagctgttggtgtgttactaaatcattccaattttgctaaatatgttgtaacgaaacaagggaagactgcgtatgagcttgctatcgataagggtcattctaaattgtatgatgttttacaattgggagacactttgcataaggctgcaagaaaaggagatgttgctgatatcaagaaatgtatcactgaaggggcgaatgtgaatggaaaggatcagaatggatggactcctttgcatagagcagcattcaagggtagagttgaagtggcgaaggtgttggtaaacaacggagctaagcttgatcttgttgattatgttggatatacgccgcttcatcttgctattgaggctggacaagaggatgtggcgatatatttgattgctcaaggtgctaaggctaatttgaagagcttcaaagctaaagaagtggtttcttgtgatttcagacatttacatacttacaactttgtatagtgaagagcaaagtacacttaactcaatttggagatcgctcttgtatatttttagctactgcagaag

SEQ ID NO: 650 - DNA, 639 bp, Lycopersicon esculentum
caggcaaggtccatcatttgagatatatatatttttattatttaaatctttcatgtcccaatttttgtttttattttttagcaaaatctcacttaagttttatcctcttcatattgttcaaattataagctagaggtggaccctaggagtgatcaaattattcagtgaagatttgagtttgcatggatttgtgaatagtcaaaattttagggttgtataaaaaacaaacaaaaagaaagaaaaaaaaaactataacaagacaatggagaaagaagaaaattgccaggctaataatactttgcctacatcttttcaaatggcaattattggtgaatcttcatcaaataatactaataatcaaatggttgattatatggtagattcacaatctatacaacaacaacaacataaccagagttcgttagggtttttaccctcgaacccttctctagacaagttgagctttgctgatgtgatgcaattcgcggattttgggcctaaattagccttaaatcaaaccaaggtattggaacaagatgttgggattgatgatcctgtgtacttcctcaagtttcccgttttgaacgagaagaagaatgataatgataatgatgatgatcgcgaagaaggcttaatgat

SEQ ID NO: 651 - DNA, 514 bp, Lycopersicon esculentum
gaaaaagttgcgaccgtacaccgttcatttttcatctccgattcgccggcgacggcgccgatgaattctctgaactctgatttcatctcttttatgagttcgaatcatgtggagctgtatcgtttctgaattcattggattttgaattttttttaggaataagcccttcccgtaagcaaatgaaatactagaagattcttttttgaggttagtatagtagtatttaatatttttaataaaggttatggaggcgcgtcctgctttatctgtccagaggacgggtgcacatcaactcagtaattttggagcatcaggagctcattcttcattacctgtgcttcaaacaagcctggaagagaaatatcctaagttgccaggatctgccctttcttcgtttccttcaaacagtggggctgtcggtcatttgttttcctcaccatcggagttctcgaccaatcttgacttttcatctgttctgccttatgatgagcatttggcacctgcaactttcatt

SEQ ID NO: 652 - DNA, 583 bp, Lycopersicon esculentum
caagttcaaccattccagcaaattcctactgcatctgtagaaacatctgctgttggtcctgcatctgtggaaacgtctgctgttgttcctgcatctgtggaaacatctgctgttgttcctgcatcatccactgggagtggttcttcatcgaaacaacggatgcgttggacaccagaacttcatgaagcctttgtagaagcagtcaacaagcttggtggaagtgaaagagctactcccaagggtgtgcttaagttaatgaaagtcgaaggtttgaccatctatcatgtaaaaagtcacttgcagaaatatcgaactgctagatataaaccagaagcatcagagggttcctctgagaagaaagagtcatccattggcgatttgtcagctctggacttaaaaacgggtattgagatcactgaagcattgcggttacagatggaagttcagaaacagctgcatgaacagcttgagatccaaagaaatctgcagctgcgaatagaagaacaaggacgatgcctccaaatgatgtttgagaagcaatgcaagtcgatgcctggtattgacttggcaaagggctcatcat

SEQ ID NO: 653 - DNA, 531 bp, Lycopersicon esculentum
gcaccagagatgctctaccttctgattggaatgatattattgctgatacaagtattggcgactcggagctgaagatgcaatttcaggaggaaaaacaacctttgaatttcccaatgcagcaagtccaagcatcacagcaaatcccacctgtgcctgtagaaacttcagctattgctcctgtatcatcccctgcaagtagtgctgcaacaaagcagcgcatgcgttggactccagaacttcatgaagcctttgttgaagcagtcaacaagcttggtggaagtgaaagagctactccccaagggggtgttaaaaatgatgaaagttgagggtttgaccatctatcacgttaaaagccatttgcagaaatatcgaacagctagatataaaccagaagcatcagaagctgggtcttcagagaaaaaacaatcttcactagatgatttggcatctctggacttaaagacgggaattgagatcactgaggcattacgattgcagatggaagtgcagaagcgtctccatgaacagctt

SEQ ID NO: 654 - DNA, 571 bp, Lycopersicon esculentum
gccgagcttcacgaagtctttgtagaagctatcagtaagcttggtgggagcgaaagtgcgtgacctctttgtttctatgttctatttctctttttagcagtttggatgagtaagagttaacgtttaacattattatattggattcacacatttgactttacagaagctacaccaaagggagtcttgaagctcatgaatgttgaaggcctaaccatctatcatgtcaaaagccacttacaggtataataaatccttcccattaaccttttccgaggtgacaatttatttaccttatacatttcattttgaatttcagaaatatagaactgccagatacaaaccagaatcctcggaaggtagaaatttcctctttgattagctgataacttttgcatccgtcaaggactcagtatacattttgctaaaacgaaaacatatgtgttacatctcctcatacttgtacttcctgcctctctagtttcttgtgcatgtgtcaaagtgatccccaactgtgaataaaactagggatcttaagttaaatttattgatggtctgttggactttcccacag

SEQ ID NO: 655 - DNA, 669 bp, Lycopersicon esculentum
aaaatcaacgttcaccgttcaaattctttcgatttcgccggcgatgaaatgaaatctcccgaaatcggcaacaacgagttagctgtttgtgcatacaggaatcaatcttggacactggttactaagaaattagaagatactaattgaggagaatatagtagtgtattgtactcatccacaaagttcaaatggaagcacgtcctgctgtgtctgttcaaagtgtggttgcaagtcaactcagtaattgtggtgcatcaggggcactttcttcttccctgttggtcttatgttctcatcatcatcaggattttccgccgatcttcagttctcatctgtttcaccccaggaaaagcattcaggaactgcacctttcatttctcagtcaacatatagtgagacatcgatccaattacctcattcgggagttcttcagtccacagcatcaagccaatatttgaatgaaaaccatgaaccctggtgtatagatccactgcctaatttccttgattattcgatggataaccctgtccagaatagtcaggtagcttctagcaataaacaaagcgattggcaggagtgggccgaccttgtactcaatgatgaagatgctctaccttctgattggaatgatattattgctgatacaagtattggcgactcggagctgaa

SEQ ID NO: 656 - DNA, 618 bp, Lycopersicon esculentum
ctataaacctaaaaatatctctaattctggttatctcgttcgtacacatctttctcttgaatactagtaaaaatcaaatatttttgaacattttttttttcaaaggaagatgatcttgttgttacaagaatacattttgtggaaatttattgtaaatcttgaaacaaagttcagtgttgcaaaaagtttttatttttggattttccaaattttcaacagatatagctgtggtacttaactaatattgtgttgaaaatcttgtttttgctctgttgttgtatagctagttgtttgttttgttttgtttttttgggagaaaattctgttacttcatcatggcaggaacatcattgcctccgggatttcgatttcatcctactgatgaggaattagttggatattacctgaaaaggaaaactgatggacttgaaattgaattggaagttattccagtgattgatttgtacaaatttgatccatgggaacttccagagaaatctttcttgcctaaacgtgacctcgagtggtttttcttctgtcctcgggacaagaagtatccgaatgggtcaagaactaatcgagcaactaaatctggatactggaaagccacagggaaag

SEQ ID NO: 657 - DNA, 763 bp, Lycopersicon esculentum
gcttcgtatggactctttagctggcctctatttttagactctgatcactcaaatttagcaacttctcaactatttagaattgatagtactagaaaaaaaaaacaacctttttttcatgttttgacaaaccatatagtgacattttgtgccttgtgggataaggcagttttgaacctttattttttttcctggaagatgattgaattgttccagggatattgcatcttatgtgaacttacaaaattcagtgtagctaaaagtttttatttttggatatttcaaattttcaataggtacagtttgaacatttagctaaatttcatattgtaatttgtgtgtagttatagcagttggaaaaatatttacttatatggcaggaatatcgttacctcccggatttcgtttccatccaactgatcaggaattggttggatattacctgaaaagaaaaactgatgaacttgaaattgagttggaagttattccagtaatagatctgtacaaatttgacccatgggaccttccagagaaatctttcttgccaaaacgtgatatggaatggtacttcttctgctctcgggacaagaagtacccgaatggctcgcgaacaaatcgagccactaattctggatactggaaagccacagggaaagacaagaaagttgtatgtaagtctgcagttgtaagatacaggaagacactaattttttaccgcggaagaactcctctaagggataaaactgattggggaatgcatgaatat

SEQ ID NO: 658 - DNA, 366 bp, Lycopersicon esculentum
caggcagcacattccgtataaccaatcagcattcttttcgcatcagccacaatcaggggctagcgaatcccagaacatacagatgcagcaatttcattccctccaggatagcttgttgactcctcatcgccgtttacttgcagggcatgggcagggtctccctgacacaatgcaacaggatcccctaggtcgttttcaaggtctggatattggtggcaggggtctgcatcttgtgaaaactgaaacaccttcaatttctgccagtgagagcagcagtacattgtgattgacttgtgcaatcggccttatttattggaattgttcatagactgacacgtgtttaacatccaaaaacatgatattcaa

SEQ ID NO: 659 - DNA, 615 bp, Lycopersicon esculentum
ggaccaagaacaccaaattaacaaagaagaaatagtgggtttttgagaaatttatgtcggcaaggtttaatcttctagctgtgattgaatttagagcaccattaaacctctgtttttcactttcttcacttctctttgttgtctctgtgcaattttccccaattttatcgatgggtttgaggcccaaaaggaattgttctggagctgtattttttgagggatttcatataaagcaatttttacatcttattttgctgttgagaacgccacttgattttaaagtgtaatctttacattttctccttttatttgttagaaattttgaatattattttttaaagaggaaatttttgctaatattgaggttatgcttaagcctttgtcatcaaaatttgagaatcttggtagaaacatgaagaaaaaagttgatacaaacagattagtgaggaaaattaggattgtttgtaatgatcctgatgctactgatgattcctcggacgatgattcgaggtgtaagcgtttcgttagagagataagttgcaaattggcaactcttttaatcttagaaaagcctctgagattgaatgttcatttcaagatagtaaccatggagag

SEQ ID NO: 660 - DNA, 869 bp, Lycopersicon esculentum
ggtttctcctataatcttccttatactaactactatacattgcactttgaaaaattcaaaaagttaaaaataacaacaaaaaagacattgtataacatttaaaaaaaaagaaaaaaagtgtgtactgtgtacagactacagagtaacagcaaaataaggcacaaaactataatcttgttccttcaatttctctacctgtatggatgtgtaatgaagtggaggcatttcaccagctgaacaatcgatccctctcgtcggatctttgaaagtggccaattgtttgatgtgtatcttatagattgttaatcttgaggcaaggggatttttttttttttagtttaagtttgattcatttcccaaataatggatatgggtagcaagaatgatactcaaggacaaaagaggaacaaggatgctactaattttcagtcaccaaacatatcgttggactggcaattaagtggaagcaacttgacaaatgcatcaatggggatgatccctaatagcaatcctttagtagattcagtttttcccactatttgggatcggcctcccaattcgtcacacttaggtttctatggtaataataatgctaatgctcaaatcagtccttgcattatgaatcagcacgagactgcagcaattggctcggtccctacgagaggtagtatgagttggaatccactgaattcgatgctgaaaggggctatgtttgtaccacctattcctggaatgattcctcaaagcttagctcagcttccagctgatttgggtttcattgagagagctgcaaggttttcgtgcttcagtggaggaaactcaatgatatgatgaaccggcctttaagcgtccctgagtctactaagcct

SEQ ID NO: 661 - DNA, 779 bp, Vitis vinifera
acaaggctcagcgtcctcagagaggagaagaagaagaaggagaagaacaacaggccatggctccaccttgccagagcgagttgcctctcaatgagaatgactcacaggacatggtcatataccaagtcctaaacgaggcttttgcactcaacaactcgattatcccaccaattaagcgccaaaccactcccacgtccagcgccctggaacctgctcggacaatagccaagaagcactacaggggcgtgaggcgtcgcccctggggaaagtacgctgcggagatccgggactcagctaaacatggtgcacgtacatggctaggcaccttcgagactgccgaagaggctgccttggcttacgatagggctgctttccggatgcggggttccaaggctctgctcaattttccagtaatagctccgctgcctcttgaatcgggagtagtgcttcatcggcatcggagaccactgttgcggaatcacaagatatgggctcatccgattgcctgcaaactatgtagaactgttttttgagacgaagtgatcaaagtaagtatccatgggcctattatgcaatgggacacaagtcccacgtacgtttctactaatatgcagatgtgttaggttctttcttttttaatttccccccttttgttattttctcaatttttggtgtgagtgaggatgtggtgatcttatcatctgtatatatacgtggtctccagttagtttcctgattataattcaattcacaaaaaaaaaaaaaaaaaaaaaaaaaaa

SEQ ID NO: 662 - DNA, 846 bp, Vitis vinifera
acatgttttttttttttttttttttttttttctaacataaaaaaaaaccaagtccatcatcaaataactaactatagccgttaaacatccctttgttgggttgggttgttacatctgacaaagtgatgaaaaccaaagagtaagcagctttgcccgtttgacataatcctttggattatagttccagtttcggattacccagcaacaattcctttgtttttctcttcttccatggttgcagaagaaagagatgggtaatagaggggaacacaagatcataagttcatgatctgtgggtttgagatagctgtcaatcatcatctgaactttctgggctagggtactcgttcaagtcgggtttgtcggagactctgctagaattgggttctgatgcgtggagggcggtctccatggcgtcaaccctagctccgacttcggtggctttctttcgtatggatgcggcggataagtcctgaacctcatcttcttccgctatatactccgggaagttgaggcgagcagagcggccccggagacagaagacggcggtgtcataggcacgggcagcggctttcggtgtggagtatgaaccaagccatatcctggacctcttgttgggttctctaatctcagccacccacttaccccacttcctcatccttatacctctgtaaggcttctcttgttgctgcctctgcttccgcttctctgtggtcgcacaacacttgccttccatcatcacaaccgacctttgttctgtgccccaaacagccccaagctaaaaaccaaaaccagaaaaaattctatctcccccggccgtatggccgaattcccggtaccacacat

SEQ ID NO: 663 - DNA, 597 bp, Vitis vinifera
tttttttttttttttttttttttttaaaaaaaaaggacccaagtaattaacattaacccttttttacaacaccaaaatttcttacctaaaaaatccaaagaaacgtttgaaaaaaagaaaagaaaaaaagaaccaagcaaggaggaagaagaaaggacagaaaattcacacaaagaagtaagagaaagagagagggcccatcctattgtttggccgccagcactcagcagtggtctccccggcgcatgttagcaaaaaaaaaacagggttgctcagagatgatagtggtggtcatcgtcaacatccgaattttcaggatccggttctttattgaggtcgggtttctcagagaaggcgcaggatttgtattggttggaagccgtcctggcacattctatagcgtctactgtcgcccccacctccgtagcttttttgcgtatagacgcagcggaggtgtcgtggagcccaccttctcccaccaggtactcggggaagttgagcctcgccgacggtcctctcaggtgaaagacgggggggtcgtaagcacgggcagcggccaccggggtggagtaggagcccagccatatgcgtgacctc

SEQ ID NO: 664 - DNA, 520 bp, Vitis vinifera
gtaaaaattcattcccttccctttcctcttcattcaatttctttcttcttttcttctcctccctctccttcattaaaaccatggaccgccgccgccggaaactccccaaaatcgccgccccctcgcagtctgaagaggtgagtagtattgaatgggaattcataaacatgagcgaacaagaagaagatctcatttacagaatgtacagactcgtcggagataggtgggatttgatagcaggtcgaattccggggcgaaaacctgaagaaatagagaggttttggataatgagaaatcgccaagggtatgctgagagaggaaaagaggctagtcaaaagaagcaatagacctcatacttacttggccatgcccaatgattctttttttgtcttcttcttcctcttggctcctttagaaaggttgttctttcagtggtagcttcttggctttcatattggtgtaaagcgtgttttgaatactcaaaaatttgtgttaaggtagccattactcaccatttctc

SEQ ID NO: 665 - DNA, 534 bp, Vitis vinifera
ttttttttttttttttgcaaatccaaacaccaaaccaccatggaaatatcaagaaaacattgtacaagcactgattatagctaaaactccacactacacttctctttttcctcttgatcaaagaaaagtgataaataccaaacagctaaactttcttacaacccccaaaattttcctgccctgaccaagaaaacaccaccccctcttttctggcctttcattcacttgatgaatatcttgaagtccagtacttctcaatttcctctgccgttcttccaggaattctcccagcaatcagagaccacctctctccaaccagattgaacatcctagtgatcagggtttcctcatcttcagagaattcaagcttggaatcttgactgcttccccctctagaatccagagagctgccatcagaggagtgatccaagtcagccattaggtttgaaaacacagaagacaacacagagaagaacaaaaattctatcaggtgaagcttgtaagagaagagggcctgtgaagtaaatgtgggtg

SEQ ID NO: 666 - DNA, 609 bp, Vitis vinifera
ttttttttttttttttttttaagtaaaatgacatgcacattaaatgattccaaaagcaaaagtgggaccaaaggggaacctccgtgtctccgggcggaccacggttgggccccaccagaaacgcagctagccacaagataacttaacaacttttcggagccactaaaaaggtgacgcgtgtcactcaaaaggattctctacaacccccacttgcctcttccgtcttcctacagttacctcttcaccacccttcgttcactgtgcacccgaaacacaaacctacgctcactctcacagtctcacacacatgttgaaggacgaaggttgtaacgctgatgccgccgccggtggaggcggtggctgggctcgtgtttgcgacacgtgtaggtcggcggcatgcactatttactgcagagcggactccgcctacctgtgcgctggctgcgacgcccgcatacacgccgccaacagggtggcgtcgcagcacgagcgggtctgggtgtgcgagtcgtgcgagcgcgatccggcggcgttcgtctgcaaggcggacgcggcgtcgctctgcgccacctgcgacgctgacatccactccgctaatcctctggcccg

SEQ ID NO: 667 - DNA, 767 bp, Vitis vinifera
ttttttttttttttttttttttttttttttatacaaaattactaggcacatttctcattaattcaaacccattacatcgagaaagatacagtattagtggttgagtctttagtaacaaactcatacaattctttctctccttgatactggatttagaatgacgggacaatgccatatccgctttccgccattaatgtcgtagagaacatctgatccacttcaacttctacatctgtcctcttggcaaacctgcccttgatccggggtcttgtctctgcatatgctttccttgatgcatacctgattgtcttctcaaacttccttgtcttctttttctctctgtacctcaggacccttgcctccctatccattggagtcagctgggttggcatctgaattggagggcctgagaaaaggtcgattgttcccttgggaggtctcggatgcgagattgagattgagatatcactcatagttgttgcttctggcacgacgccaacatccattgatgacacagagacgctgtggctaattgaagggttgtagctgtaggcagctttcgaggactcatactccatccccagatgaaaaccctgctgctgatgctgctggtgtagctgcccctttgcttccccgcactgaactggcacgacactgtctcccccataattcttgtgcggaacgctgtaatgcggcggcggctgctgctgattatactgatcactgaactgattctcagggcatgaattgtactccactaggtcccc

SEQ ID NO: 668 - DNA, 910 bp, Vitis vinifera
tcccttctcctctcctctccatttatttactatattttcctcttgcatccaaactctattcccagttggtagtatccgtccacaacgcccttccatccaaactttatttccaatttaggggttgtggagaaatgattttccatggggaaggagctgaaacatcagtcaacaaacagcaaggtggactgaggataagtgagaacggagatgaaggagctgaagaagataatccaggtgagtggctgaatttaagcctgggtaggaatttgccgtctacagctctagactcagacccgcaatcaagaccaacttcttccaaggttttctcatgtaacttctgtatgaggaagttctacagttcacaagcattagggggtcaccaaaatgctcacaagcgggagagaggtgcagctagaagatatcagtctcataggatgatggccatgatgggtttgcccatgaatacacctatcaggtcacttggcgtccgcccccattcactagtgcagaaaccaaacagagatggaactgcaattgtggcgagatttgatgattccaacacgggctttggaatgacatggacacccttcacactagaggaaacgatggacgtgatgtggcccggaagctaccgcttggaacaacaaccatcagagcaaacatcagagccacttaagctcgacttaaatctccggctctaacagacccttcatcagcccttgtccagaattgtccatctcggttcatttctgtaataacagttcttgttttgttcttccatcaaaaaacatgtactgtgtactaacttaggtatgagccaaacaactttgaagagtcaaaaatccatgcctggatttctgcctaatatctctagaaaaaacactaggaatatactactgtttatgcatat

SEQ ID NO: 669 - DNA, 907 bp, Vitis vinifera
tctgaagtcagtagccaagtagcgtccaatgtatccatccaagagacttcctctgatccctccaaggacagcactacgacatcatcttgcctcacaaatcttataaagcttcagccagaccaagggtctgtttctctagacttaacactatgtttcaaccccaacgacaccaagttgaagggcatgggtgagagtagcagtgatgcagtggctcaggctccagtggcaacggccccaaaggttttctcttgcaattattgccggcgcaagttcttcagctcacaggcattgggtggccaccagaatgcacataagagagaaaggacactggcaaaacgggccatgcggatgggaatgttcgcagatagatacactagtttatcatctctgccccttcacggttctgcattccggtcccttgggattgaagctcattcctcactgcaccaaagaatggtaccgctggaaaggcctgatacaaggggcggagcaaggtttgagcaaggctattacgggctgccagtgttcatagaagatgaagaagcagagctgttttggcctgggagttttaggcagatcggtgaaagagttggaggcagtgcaattcctgaattggctcaaggtcccaatataaattttgtaccaatggctcccccaccaaccacagattcgtcttcacctgatctcactttaaaactataagattctttccccccttttttccttcatttcctctggactcattactcctcacagggttcactttgtacagcgagatatgctcgaggcatggcggctaccctcggattttccactctcttttgtttctttaacttgttttcttttccaatgatgtgctgcggttgagctagtaagttgtatgagaagtatctgaagatgaatttta

SEQ ID NO: 670 - DNA, 685 bp, Vitis vinifera
ttttttttttttttttttttttttttttttgacttactgggacattattataattgtcattaagcaagccataatgctaattaaacaaaggcatagagacccagtcttgcaacacaaaataaaaatagttttttttttttttgggtttttttcttagtcctggccataattaatactcaaatatctcacaagtttatatgatcaaaccacaattaataatattacacacccccaaacatcctgctcaatccatcttggccctttcggtcgttgaagatcaaaggagcaggctgggggggccactgccttagctcctattcttgcatttctccatggctctaggggcgagccctatcgcctcttttcctttcattatgcgcaagcgtttgcatgaatccacaaacatctcccatgggacatctccaacgagcatccaatccccatctttgtcttcgtatgttggaacatgatcaaaaccattcaaaagatccatcaacttgctctcatttatgaaatccttcattccttgtgatccataattcccaatagtgaaggagctgaacatgttgcccaaggcattggacagctcctgataactagtgtacatcttcaagtcaaccttacgcagatacggcgctccgtccatgctaaccttcacaaaggctgcgttgcagctcaccttccc

SEQ ID NO: 671 - DNA, 358 bp, Vitis vinifera
  misc_feature (139)..(139): n is a, c, g, or t
ttttttttttttttttttttttttttttttattttactaataaacaaccgatacgaaaggtacgattattgcttcttggccattacaaatgccccgatctttgataattatataccgtcaaataaaaatacggacacancgatccaacatcctcatcaatcgaagcttgaacaccgggctgctagctttatcttctaagcttcatggatgctggacttgtacggggctgtgctggatcagcatctattcttacacttctccattgctcttgggatcgaaccaattgcttctgatcctttcattatacgcaagcgcttgcatgaatccacaaaccccggccgtagtgggcgaattcccg

SEQ ID NO: 672 - DNA, 780 bp, Vitis vinifera
atgtcaccgcagctccctaaaccctcgccggaatcttcctccgccggcctctatttcaatgataccgagctcaccttatgcctccccggcgctaccaagtccggcaccaagcgcgggttctccgacaccgtcggcttgaacctccgtggcccctgcaatacggatcacgctagcaatccatctgaaaacgatgtttccggcgactccaagcctccgccggcaaagacacaaattgtggggtggccgccggtgaaagcgagtcggaagaatgttgcgaagatcagcaaatatgtgaaggtggcggtggacggagctccgtatttaagaaaagttgatctggagatgtacggaagctatcagcagctgttgggatctctcgaggacatgttctcctgcttccctattcggaattatcttaatgagaggaagcttatggatcctgtgaagggatccgactacatgcctacctatgaggacagggatggagattggatgctggtcggcgacgtaccatggaaaatgtttgtggaatcatgcaagcgactacggctgatgaaaagcattgaagcaattggactagctccaagggaatctcaaaaatgcacaagcacaagtggatcaaaaagcctatagtttgatagcatccttggatgataatttgatgtaaaaaggcttcttcttctatttttttcccctaattttgattggttttaggtgaccaaaaaaaagagaaaatatatgtaaaagagacttttagagtagagaaatagacgttagtta

SEQ ID NO: 673 - DNA, 715 bp, Vitis vinifera
  misc_feature (568)..(568): n is a, c, g, or t
tttttttttttttttttttttaatttaaaatttaaaaattatataaaaaaaaatgtatacatttggggacagagaatctctcatctcttacaaataaaatacatggcactgaaaatttctagggaaccaaaaaacactcacaacaacaagaaaggacgatgcatgagggttgttattagactaacaagaagccattgataatagacaaagctacacaattttgagcaacagtcttatgaacaagtagtactgttattgtttcttgctcctaatacaatttcccagcttcttttctctctcatatttatatatcatgccaccatacaagcacatccatccatgatcctcagctgcttctggctttcctttgatgggcagactgtggatgggtgcctctagcttctgttcttgcacttctccactgctcttggggcaagtccgatggcctcggatcctttcattatgcgcaagcgcttgcaagattcgacgaacatctcccatggcacgtctccaacaagcatccagtctccatctttgtcttcataagtaggcacgtaatcggaaccgntcaaaagatcgatcaatttgctctcattcatgaaatccttcattcttgtgatccacagttgccaatagtaaaggagctgaacattttgcctagggcatcagagagttcttgatagctcttgtacatctttagtccaccttacgtagt

SEQ ID NO: 674 - DNA, 988 bp, Vitis vinifera
gaggaagaaggagaagcaaagagagaagatagccatcatcatcaacgactagaatagagcaaggtttccccggagattccatggaagttggccggaaaatgtcgagcatgctcggggctgagcgtggttttgatttcaaagagactgaactctgtctggggctgcctggtggaggtggaggtgaagccgagacgcttaaggcttctggcaagagggggttctccgagactgttgatctcaaactcaaccttcagtccaaggaatcagtagtggatctgaacgagaatgtcaagtgtccacccaaggagaagaacctccttccttgcaccaaggatccggccaaaccacctgccaaggcacaggtggtgggttggccaccagttcgatcatttaggaagaacataatggctcagaagaacagcagcgaggagggtgagaagggaagcagcggtgctgcattcgtgaaggtttgcatggatggcgcgccatatcttcgcaaggtggacttaaagatgtacaagagctaccaagaactctctgatgcattaggcaagatgttcagttcctccaccatgggcaactatggggcccagggaatgatagattttatgaatgagagcaagttgatggatcttttgaacagctctgaatatgttccaacctatgaagataaggatggagactggatgctcgtgggtgatgttccatgggagatgtttgttgattcatgcaagcgcttgcgtataatgaaaggatcagaagcaattggtcttgcaccaagagcaatggagaagtgtaagaatagatgctgaaccagcacagcctcgtacaagttcagcatccatgaagcctagaagataaagctagcagcactgtgttcaagctttgattgatgaggatgttgtttggatgtgtctgtatttttatttgatggtatataattatcaaagatctgggcatttgtaatggacaagaagcaataaacgta

SEQ ID NO: 675 - DNA, 841 bp, Vitis vinifera
tgagcatccattgggtttcatttagaggatgctgtggacctgagtggaagcactgcattcaattcgacaaaaccaagtggtcgagcagttacttctgatcccctccatactgtcacttttgataagtcacaaaattcatttgatataaatccaactgctgcccgggtggagtctcagaggttgccattgcaaaagggtcaacaatcaaatctggtttctatatctagtggtagtgtagagaactggggagagtctgcaatggcagatgccagtcctaggactgatatctcgacagacgtggatacagatgataaagttcagaggtttgaaaggggtcaacctgcttccaatatggcttctgattccagcgacggatcaaaggataaaatgatcagaagactcttcgtaggcttgctcaaaatcgtgaagctgcacgaaaaaaccgattgagaaagaaagcatatgtccaacagctagaaagtagccggatgaagctgacccaactagagcaggagctccagcgagcgcgacagcagggtatttttatttcaagctcaggagatcaagcccattcaatgagtggaaatggggccatggcatttgatgtagaatatgctaggtggctggaagagcagaaccgacaaatcaacgaactgagatcagcagtcaattctcatgcaagcgatgctgaacttcgtgttattgttgataatatcatggcacactatgatgacatattcaggctgaagggcgttgcagccaaggctgatgttttccatttattatcaggcatgtggaaaacacctgcagatcgatgttttttgtggcttggtggtttccg

SEQ ID NO: 676 - DNA, 819 bp, Vitis vinifera
aacttcggatattgtggacaatgttacagcacattttgacgacattttcaggttgaaaggcattgcagccaaggctgatgtcttccacatcccgtcaggaatgtggaagacacctgcagaacggtgttttatgtggattggcggtttccgttcatctgaagtcctcaagcttcttgtaaaccaattggagcctctaacggagcaacagttgatgagcatctacaacttgcagcagtcatcccaacaggcggaggatgctctctcccaagggatggaggccttgcaacaatctctggctgagacgttaaccagtggctcacctggcccatctggatcatcagggaatgtggcaaactatatgggccagatggccatggcaatgggtaagctagggactcttgagggatttcttcgtcaggctgataatctgcgccagcagacgctacagcagatgcaccgtatattgacaacccggcagtctgcacgtgctcttcttgcaataaatgactacttctcccgacttcgagccctcagctctctgtggcttgcgcggccacgggaatgatgttgtatgagtatcaggatcgtctttagaaatatggtctcctgctagggaatcaaaaggctcacttccaacttcggagtacttttgggacctatacatggtgcagggaggctgtagtggtggtttcagctccatctacacatgtaacatgagatatgttcactgggtagttgtatgcttgtttcatatgttcagttaggtgatgtatttttatttcttatgtctcagacaacagtgccaataatgtgatcatg

SEQ ID NO: 677 - DNA, 809 bp, Vitis vinifera
tttttttttttttttttttttttttttttttgagagataactgactgaactatgaaaaaaaaaaagttaacattgatgagattcaaaaatgctagttaatgaaagtttctccgccaggatgactaaaaaaaatgctgaaaaatgtgtcatgcccaaagcaatgttacaatgaagaatagaatgagagctaacccgaaacaaaatccgacaatcgccatgaaagcctttccctgagattcaaacttgaattttactgtaaaccatgacaatcctctatctacaataggagcaagtgcaagggcccctccagctctgacaagtttagtgacctggctgcctgcccacaccatagccatgattttgacaaatctttcaactgccgccaaataacccatccttcctggtgctggagcaatataaaaccataccaagagaaacgttgtaagatagtatgcagtattcaggagtccataggataatattccagaaattccatatctcttcagtttctttagaagatcttttgatgtgtgcagttctccttcaccattttcgccctctgcacttgagtcttcatggttggcagagtagtcatgaccatttgacatgtcagaagcaccagcatggccattgattgagcagaaacgcagatgacgatgatggtggtggaattgggagaaattgttgagtttgtggaatgtgggaaccctaggaatgctgggattgaaaccctgatgatgtgaaagcagcttcagctggtgaaggcaaactttcgacgggagagacatgagcataccggcctccccccc

SEQ ID NO: 678 - DNA, 715 bp, Vitis vinifera
agaggagtctcctcctctgcacccaatcttcaacccaatttacggaccggaccacagccaccacagcagcagaccgcccggaagcaaagaagatgttggtcacctgagctgcatcgacggtttgtcaatgccttgcagcaacttgggggctcacaagctgccaccccaaagcagattagagaactcatgcaggttgatggcctcaccaatgatgaagtgaagagtcatttgcagaaatacagacttcatactcgaagaatgccgactacctcggctgcccctccttccaatcaacctgttgtagtattgggaagtctgtggatgccccaagatcagtatggtgactcctcaaaggcgagtagttctcagtctgcttccccccaaggtcccctccagttaggcggagctgctggagggacctcaactacaggtggggacagcatggaagatgatgaagatgagaaatctgagagctatggctggaaaagtcaagttcacaaatctgtaaaagaggatgtatagaactcatcccccatgaattttgcagataaaaatagacatgggagggtaaatgactataaaaataatacagtatacgttaagacaatggatcttgagagagagaatgtgaaattttgcaggattagcttcaaaaaaaaaaaaaaaaaaaaaaaaaaaaaaaaaaaagagatcaaaaaaaaaaaaaaaaaaaaaa

SEQ ID NO: 679 - DNA, 653 bp, Vitis vinifera
tttttttttttttttttaaatgcaagacagagaactttattatagaaaaggattatcatgtcagcttcctccagtcctccaacaaagggaagagatacaaagcctcaatgaaaaggtgagaagactcaaactgtctaaagaacctgcaaaatctaaccctctcttctaagagatgggtgcctcaaaaagacttcagaatgttagtttcgctctctgtatattatgtttttttttttctaatgtcacagtacgattccccatgtatatttgtatctgcaaaattcatggtgggatcagtgcatgactatacgtcatcttctcctggcttgtgaagctgatctttccaactgtggccctcggatttatcatcttcatcgtactccatgctgtctcctccagtacctgatacacctttagcagacccagctaaatggagtgggccttgtggagagccggactgggaaatgtttttctttgagacgtctccaacctgaacttggggcacccatgatccatttgcaggagcagctgaagtggatgggatcctccggacgtgaagtctgtatttctgtaaatggctttttacttcatcgttagtgagaccttccacttgcatgagttctcgaatctgtttaggagtggcttgagatccc

SEQ ID NO: 680 - DNA, 562 bp, Vitis vinifera
ttttttttttttttttttttttttttttttataagaaaaaggccatatatttattcagctgctaaaagagcgaacctctgatacaacaatccaagcaatttcctatacagaaacattccctttccccccttcccctaccaaaatggatgataaaaccgcaaaattccacatatttacacatcgaacgaaaaaacaacaaaataaaataagagctcatctctaaaaaaatcccagcccttatcggtatcaacttacctcaaaaacttccacaaaagaatattcaagcagcaattgcataggatctttcacataccaatgtaagtgcctccatgaacaggccagaaaaactggtcattgcctggaaaacccctggcaagcctgtttgaatgttattcagtgtcaatgctctggtcacttctaccgccttggaatgcctcaccatctcatcttcaactcgcctttggcaagctgcaagctcagctttcttctcagaaagtgggtctcgggcatccaacccctgcccattgtcaggcccagaatcaggaagccctataccaacccc

SEQ ID NO: 681 - DNA, 704 bp, Vitis vinifera
gcttacccgttagagttagttggaagaaatgaaggtatgcgagctctgcaactctccggcagtcatctactgcgactccgatcaagccagtctctgttgcgactgcgatgccaaggttcatagcgctaacttcctcgtcgccaagcattccaggactcttctctgccacgtctgccaatctccaactccctggaacggctccggccctaagctcggtactaccatctctgtttgccagaggtgtgtaaatcgcagccgtactgtaaatgagactccgtcaaccgatgaggatgaagatgaggaaggtgaagaagatggagaagacgaaggcgacgatgaaaatgatgaagaaaatcaagtggttccgtggtcatcgacgccgcctccgccgatctcctgctcttccgccagcgaagaggaatcttccagcaggttctgtaacggagaagaaggtccatcggattcaaaatcagcttcttcgctgaagccaatgcgccaacaatcgtccttcagacctacttctcaaaatgatctagggcggtctgtttcaccaccagcacacaacctgcgcatcttcatgaagtgaaacgaataactgcagcaaccaacaagctaatgttgaagcagagtgacgactgaggcaagatcaaccgcccatggcattttctactcactaattctccttccgtttcagcttattttcc

SEQ ID NO: 682 - DNA, 823 bp, Vitis vinifera
tttgggagatctaggatatttctgtgaattgaggaaagcctcttctttcatcttggagttacagacgaaagcggattgagagagatgaaggagtgcgagctgtgtagctttccggcgaggatgttctgcgagtcggatcaggcgaggctgtgctgggactgcgacgagaaggttcatggggccaacttcctagtggccagacactccaggagcctcctctgccatgcttgtcaagctcccactccctggaaagcctccggcacccgcctcgcccccaccgtctctgtctgcgaagcctgcgttctccgttgcgacaaagaccgacatcggagctccggtgaagaccgggagagtgaaggaggtaataccgatgacgaggaggatgatggtgatgatcacgatgacgatgatgagaacgatggcgatgaaggtgatgaagatgatgatgttgaagaagaggaagatggagaaaatcaagtggttcctttgtcatcatctgcggcgtctctgcctctccctcccgatgccagttcttcgagcagcgaagatggggaggcctcgagcaggttctctgccagaggccgcggaggtgtttcggcactgaagaggacgcgtcagaatgcagatcttgatctcgattccgatgatgacattggctgctgctcctggcaacacaaccacaaagcttcgagaacagcgtacgacgaagaagatgcttctttgagctcccggaggccatgttacgaacggcggcctacagagctgaaccgatcgctaaagctcgaagagatcgacgaaacagagtcaacatcgacggcgatca

SEQ ID NO: 683 - DNA, 600 bp, Vitis vinifera
tggacgatttgtatggggatggagatgtgtattttagagatgaacctgctttccctggaggttcttcgatgagtacaagtgattttatatccactggcttcacaacttccccagattacttgatgctgcagaatgatgtcatggtgagcaaaacttctgagaggagttctggattggactccacgtccatccctcctgcgaaaatgtgcacagtgtgcaaggctacggtctcctcaacatggcgctatggccccaagggccaaggaccctctgcaatgcttgtgggcttcggtataagaaggaacacataaagctatgggaaactcctatccattgttcaaaccccaagggttcaacaaagagaagaaaatcctccacaacaaatgggttctaagttgtgtctggatatcggttgctcatctttttgtgtctctgcttatctcttctattactattttacatcatacatgatgacttcgataaaaagtctgatattttattgtttagtccatgagatcacacataggaactctctctttcagcgacctgtacatcacttcaagtgtttaraatctttgctgtaaaaaaaaaaaaaaaaaa

SEQ ID NO: 684 - DNA, 516 bp, Vitis vinifera
ttttttttttttttttactaccatttaaaatattgaaagctatatatatcgagaatattcaacatgcataactatacttgtgtcgagttccaagcagcttaatttcaaacatatagtgccaaatttcttttagaagcaactgggcattattgatggcaccccttagggacatatatactaatagggaattctgaaagacaacaactgattcgatacaaacacataggatggggtattaatattgagactggactggtactgccgagtgaatgtcgtgtaaaagctccatcttctatagattacaaggccagtccatgaaactctgtaaagaagtaacttcaaagataatctcagttttgatgtttccgaagatagatctttcttatagttgcatttgcacaaagtataggcatcttcatgtcttggtgagaataccttgaaagtgtagatgcagggtacgatccttctatgcctcacccaggggatgttcaaattgagttacagaaacagcatgta

SEQ ID NO: 685 - DNA, 725 bp, Vitis vinifera
tgaaactcatgacaaagagattcacaatgaaggatcttggaccgggtcaaatactggatcagtgaacgaggggggcaattgtgatacaaattgggatgttgaaacccagagccaccaaccttatttagacacgatggaaaaagaatcagactcagctttcgagttaaagttgagcgagagatcagccttctctagaggaagaacaaacacggacaagtgtgtgaaggggtttatgccatataaaagatgtttggcagagagagacacccagtcatcaataataattgggaacgagagggaggagcagaggaaccgcctttgcttgtagcgtctctcactggaaagaaatcccctagagcgcagtttcccttttagtgcatagatttttttttgacagattcagaaactgattcaggtaccgttaaagaagaaaatggggcagtaaaacggcagccatttctgaagctttgcaaagtctcttctacttctctactagtactaccttttcccctcatctgttcaaatccataaccctactcctttacttgcaatctcttttgtcctttcggaattagcttttatattcctttttaattctttttgcctttgttgaaatgtgaatccttgatcacactctaattctggtaatgtcctggacacctatgattggaggataaatttacataaagtgcagcattttcgaccaaaaaaaaaaaaaaaaaaaa

SEQ ID NO: 686 - DNA, 502 bp, Vitis vinifera
cccacgcgtccgatgatgggtagtttttcttataccatacagattttctatccctattgcagtagagctcgacagctgattccaaagtgaagcaaatagagtagccgaccagcatgggcgatgataacaggaaatttacctagatcctaccgctctaaaagcaagtgcgatccgacccgaagaaaggggtgtgaaaaaaagggaagcccacgcaacccaccaggcccttgaaactgagaagaagctgaacgggcattctatataatgcttagtgtgtaatgaaggaggttgatttggagtttgtggtttcttggggttgaagaataatatatatagcttggcgcatgtgacatacgtatgggttgatttggagtttgtggtttcgagtgttggatatataatccataagtactatgtgtattaggagtttgcttaattaataatagagctgacttaggtcagtctccatgagaaaaaagaaaaaagaaaaaaaaaagggcgg

SEQ ID NO: 687 - DNA, 396 bp, Vitis vinifera
tttttttttttttttttttttttttttttccgagaatcattaatccattaccctcattcttatttaaaggcagcagaaacatatacagaacctacaacccaaacatggaccgagaaaacataagaagcaaggaaaggagattgatgatcagagaatagcacaaacagaagcggtttctgaatcagcggcggtggaggcgctgctggactgatcgccgagtttgacacctggccaatcacggcagagacagtgttcgccttccgggactcgtttatggacggagggaacatgccttccgcacccaccccatgtggtcttcccacaagtcgagcacttcacctcgtagcacatcttcgtcttccttctcaatttcttcttcaattttttagggtcccc

SEQ ID NO: 688 - DNA, 641 bp, Vitis vinifera
tttttttttttttttttgtgtttctcagaattgttttggatttcttagagaattgttctggtcataaccttcataaggtacatcttcatttccataaaatcccatgtaattgggatcccctgagtaaggcgacatgcagccaatgcgactgaagtcatcggcaaattcaacttccccaggaaaatttgagtatgatgaacagggtgagatttcactgtatggattccatgaactcattgagtttgcaaaatcatactgtggaacaaattcagatacagtctcttgtccttgctgatagtcctttgaagaatctagaattagatcaggtgagacccagaagtctgtaggattggtcccctttgaagaaagctcaaaatccacaggccgtgcggcttcataaggggaagccataggactcgaataattactctcattgtatgcatgactagcttgagatggaatgttgtctgagatgctcaagatctcattcgagattgctgcggaggtgaaatcaccattgcttgaactgcttcccacctgctttcctttcgcttctccatggaaatcacttgacttttgtgtcggatcattcttcttaacaacacgacacaaagcaaaagccccctgaaaacctgatcctt

SEQ ID NO: 689 - DNA, 591 bp, Vitis vinifera
tttttttttttttttttggcagaaatgattaattcatatataaattgaatattatagaaagggagagtccaaaaaatgtctctctcaatgtgattttcttctcctaattattaactctcacatacactaatatatgaatttcggtcactgtcagtaatatcttcaagcaatctgctgaagatcatcaatgaatacaactggattaataatgataataataaatggggtttgcttgatttggattgaatttttgatcagcagaagttccacagatggatatcaccttcttcatagtcatcttcaatcgttggtactggattgaacaaggcacaattactgaacatttggtccatgtattttggggattgcagggtgtcgaagttgtcataccatgatgccatcatggacattggttcattggccatggatgacattagtactgaaacatcgtcatcgagttgatctgatggtgaagatgaagtcgatgccgaagagattgatgatgaggaggagggaggaggaggagagggtggagtggtggtggtggtggcggtggcggcggcggcattatctgcaaaactattggcagct

SEQ ID NO: 690 - DNA, 777 bp, Pinus taeda
attgatatcggaggagggagctcaccgttgtcgttctcccctacggacagtggcagcggcgttcataatagtatcaatgatcatgattatgatgatacggagaccaatggcatagccaccatgggatcctgccaaaatatcaacagcaaatcaatatcggaaggcaatgaaaatgaatttagacaacaagattgcgcttcttgttattcttattctttcaaggtgaagccacaagaagacgagaatggcgcgatgaaccagatctggggtaggcattacagaggagtaaggcggcggccctgggggaaattcgcagcagagatcagagatccctccagaaagggttccagaatttggctcggcactttcgacaccgccgaagaagctgctctcgcatatgaccgcgctgctttcagtatccgtggagccaaggctctggttaacttccccctcgctgttgcgccgaattcagagaaaggctcgccagtgggtcacatggaacgtaagagaaagagaagaagttgttagagtgttaacctggaaagaaatctcaatacgtagatctgttatgtgtcgattgtttgggatttttcgattgtaaaatccaaaaatatctagaaattaatgattagaaaagagtcatttgcaatgaaatgaaaatggggagtaatctaaagcgccatgaatcaacgagtgtgtatggaaaaattaacagttgcttctgattccttcccattctcatctcattattatctatcaataaatatattactgtgc

SEQ ID NO: 691 - DNA, 609 bp, Pinus taeda
  misc_feature (391)..(391): n is a, c, g, or t
  misc_feature (405)..(405): n is a, c, g, or t
  misc_feature (465)..(465): n is a, c, g, or t
  misc_feature (509)..(509): n is a, c, g, or t
  misc_feature (521)..(521): n is a, c, g, or t
  misc_feature (524)..(524): n is a, c, g, or t
  misc_feature (527)..(527): n is a, c, g, or t
  misc_feature (533)..(533): n is a, c, g, or t
  misc_feature (536)..(536): n is a, c, g, or t
  misc_feature (564)..(564): n is a, c, g, or t
  misc_feature (575)..(575): n is a, c, g, or t
  misc_feature (580)..(581): n is a, c, g, or t
  misc_feature (603)..(605): n is a, c, g, or t
cttgtgggctgagtgtattaaatttattgatgctgagttacttcttttggcaagtcaagactcattttaggaagcatttctatttagaggccaaattcatggtgtaacctgagcttgagaaggccaaatatcctgtgcaaaacgaatcattatccagtccaaaaaattgctacaggaaggccgagttaattgttacaggagggccgagtcatccccaattgtgatttcactgtcaaaggaagctgagtctgttgctcttcaaaggttcaagtcattgctccaagcatactacatttgctctgattttttagggccgaattttctgtagcaaaagaccaccaattgttgggcttgtcatcagtttttgcagaaaaaaaccttgatacttcanaaaaatggtttcangttctaaaccctcctttttattccaatttcccatggtgaatataataaaattctgattgnctaattgacaaaaaaaaaaaaaaaaactccaaggggggcccgtncccattcccccnatnatnaatctnttncattccttggccgccttttacaactctnactgggaaaancctgnntttcccactttatccccttcannnatcc

SEQ ID NO: 692 - DNA, 1231 bp, Pinus taeda
caatagagctgcgcagattaatcatgtcttgcagtgttggaggcatggagaaatcaagtacgggcgcacagcaggagaataaatgcagtttggatattttcgcagagaccgagctcaggctcggactcccaggggtagctgcaggagaacggcagaggatctgtggaaaaagaagtttttcggaggccatggaatccagaaattttagcattccacaggaggaggctcataaattccatgaacccaatttaggcacagaaaaacaaatggtccgtcctgccaatgatcctccaaaaatgggaccaactcctcccaaggcacagattgttggctggccacctgtcaaagatttcaggaaagtcagaacaattgctgcatccagctctctttatgtgaaagtgagcatggatggagctccctatctcagaaaggtggacctcaaaatgtacagcacctatcatgacctctcctctgcactcgagaacatgttcggctgcttaattaccatgggcaagtgtggatccagtgggatcaaggagagcaatttgatggatgtggtgaatggatcagaatatgtggctacttatgaagataaagatggagattggatgcttgtaggcgatgtcccatggcagatgtttgttgattcctgccaaagagtgcggatcatgaaggcttcagaagctattggtttagctcctcgggccatggaaaaatgaaaaaaccaggaattaacaggaattacagaccacccataacgatttagactctatccacatacatgattattggagttattgatttttgggaggctaaattgttctcaaactaattgtaacgtggtgcaatatgcacgtggtgagctggctgctcttaggttattgattgagatggaatatgattgttcatccacgatggctcaagatccgctgtatcagaaaactattttcagttattttttataaatggtccgattgttttaaatgttttcctataatcctttgacatagcgataaaggaaaaattctacatgcactttccaggatttgataattctcctgaaatattatttttgaaaggtctcacccctctctgtatatatgatttgtgtgatgagaaaaatgtttgacacccaaaagaattttaaattctataatgtagatcactgtgaaaaaattggaattgacgagccggaaattttgtgactccgcaaaattgaagcactgttttc

SEQ ID NO: 693 - DNA, 1236 bp, Pinus taeda
gcacgagatcttttacaagtattcttcctttttctcctcttttggggttgtttcaatcttgggctctgatatcttcagaggaaggactaggactttttcgttacaggttgtgcagaatcaacatgtcttgcagtgttggaaacatggccatggtcctggagaaatctggtgggaacgcgcagcatgagaagagagatagtttagatttcgcggagactgaactgaagcttggactcccaggagtagctgcaggggcacgccagaggatctgtggcaaaagaagcttctcggaggccatggagtccagaaattataccattccagatgaagacattacaaataccagcacacatgaggaccttgataaattcaagggacccatagtcaaagaaaaacaaatggccctttcagccaatgaccctccaagaatgggacctccacctccttccaaggcacaggttgttggatggccacctgtcagagatttcaggaaagtgagaacagttgctgcatccaattctctgtatgtgaaggtgagcatggatggagctccttatctcagaaaggtggacctcaaattgtacagcacctaccacgaactcacctctgcactagagaagatgttcagctgcttaattatcatgggcaagtgtggatcccttgcgttgaacgagagcaatttaatggatttgcccaatggatcagaatatgtgcctacttatgaagataaggatggagattggatgcttataggcgatgtcccatggcagatgtttgttgattcctgccaaagaatgcggatcatgacggcttcggaagctattggtttagcgccaaggaccatggaaaattgtaaaaacaggaatagagtccacccataatgttctttgttcagtgaatctggaacctgattattcatgatatttttttgacttttgaggagggcatattcaatcagcctctatctaacgcatgtgttagaaattacgatagtcgatccaataccctgcatgggatcggatggtcgctgactgttttaattggagaagttaccagcttgggggcgatcgcgcctccgtctgcggaatcccgactaatctatcctatggatttatagaactggcattttcagaagctatgtgtagtaaacaaatatggtggtcaggcaaatacagtttggaggacccagaaatttcactgtaaatgattattggaatgattgattatttagaatct

SEQ ID NO: 694 - DNA, 1209 bp, Pinus taeda
  misc_feature (1129)..(1129): n is a, c, g, or t
agattcattcagaggaaggactttacattacagttgtgcagattaatcatgtctgccagtgttggaggcatggagaaatctggtacgagcgcacagcaggagaataaccgcagtttggattttgcagagactgagctcaagcttgggctcccaggcgtagctacaggggaacgccagaggatctgtggaaaaagaagcttttcggaggccagggaatccagaaaatttagcattccacatgaggaggctcataaattccacgaacccaatttaggcacagaaaaacaaatggtccgtcctgccaatgatcctccaaaaatgggacctcctcctcctcgcaaggcacagattgttggctggccacctgtcaaagatttcaggaaagtcagaacaattgctgcatccagctctctgtatgtgaaagtgagcatggatggagccccctatctcagaaaggtggacctcaaaatgtatagcacctaccatgacctctcctctgcactcgagaacatgttcggctgcttaattaccatgggcaaatctggatcccatgcgctgaacgagagcaatttgttcgatgtgcggaatgggtcagaatatgtgcctacctatgaagacaaggatggagactggatgcttgtaggcgatgtcccctgggatatgtttgttgattcctgccaaagaatgaggataatgaaggcttgagaagctattggtttagctccaagggccatggaaaatgcaaaaacgggaattacattcagtgaatgtggaatctcacgagggttgaatggtagttctttgatgtgcgtggtcggcatatttgatcagccagttgctaaggcatggattagaaattacgatggtattggttggtccaatcggcggccgtggtatcggagggtctggtccgactgactgtttcaaacgaagaagttcgtgtaagggggacaacattactgataatatctcaattgtacaaaaaggtgaacacgctctctccaaaacatggatcaaatattttggttttaaagaatctgcccttctcctcaacttctgtgcagtatgtgtacaaatttatcaaatacaaagctaatgggtacgggaattccactgtgtaaatctgaanaatttttgacaaattttatgtcaaactaattgtaacctgttccgcaatatgtacgcgttgagcaacacgctaattttgtt

SEQ ID NO: 695 - DNA, 772 bp, Pinus taeda
aacaccgtcttcacgatgaatctgtaatcttatatacattacaattgagcaatgtttcgtatccatgacaagcagctcttgagctacagaaatgaatatacccaagtgtcattatgccaaatagcaaattacagttttacagttcaagggctaacgttgcctttcagaacgatagaatttaagagaagttaacatgttgaatccttaacccactgtcataagcctgcactgggatgaggctggtcttccattattcaatacttgttgagacagaaatccagatttttggtttgagattaataaatcaacaagtgaatcctacctaagaatgtatcagaaacagaaagattgccaggatggttcccaaatcttccagttcaatagcagatccattgtgtcttgcttatattgccttcgtttcagcgaaatcaccaatttctgaggttttcaaagtcacaagataaaaattttggacgccgtgattttccctaatgctccaatcttgtcagacgacgttctatttgaatcaatcgaaatgcaaagcagcttccagagaatgggtcatacgtgaaccctaaatcttgtttttacatttctccatggacctagctaaaccaatagcttccgagaccttcatgatacgcattcttttgcaggaatcaacaaacatctcccatggaacatcaccaagaagcatccaatctccatctttatcttcataggtaggaacatattctgacccattcagcagatccatcactttcttctcgtt

SEQ ID NO: 696 - DNA, 502 bp, Pinus taeda
  misc_feature (293)..(293): n is a, c, g, or t
  misc_feature (295)..(301): n is a, c, g, or t
  misc_feature (355)..(357): n is a, c, g, or t
  misc_feature (388)..(388): n is a, c, g, or t
  misc_feature (473)..(473): n is a, c, g, or t
  misc_feature (475)..(476): n is a, c, g, or t
tgctgagtccaaatctaagcctgaagtgggctgtagatccttctttctacagccccctgaggtacttatatgaccttctgatcatcacagcgcacaaccttcaacttctcggccacatgttcgtttctcggcttcaacttcctcctcgcagacatttccaattctgagattcaagaaaacagctggagttcgcgccttgagcttcaaaagtcgcagggaggagcgttgcctcgaccaactacttctgcaagtaagaactatcctattacaatgaacacgctatctcgcgttcntnnnnnnntcagattccatcctaccgacgaagaacttgtagattattatctcagaaagaagnnngcttcgaaaaggattgatttggacgtgatcnaggacattgacctttacaagattgagccttgggatctccaagagaaatgcaagatagggtccgaggaacagacggagtggtattncnncagccacaaagacaaaaaatacccta

SEQ ID NO: 697 - DNA, 491 bp, Pinus taeda
  misc_feature (346)..(349): n is a, c, g, or t
  misc_feature (389)..(390): n is a, c, g, or t
  misc_feature (402)..(402): n is a, c, g, or t
  misc_feature (404)..(406): n is a, c, g, or t
  misc_feature (413)..(415): n is a, c, g, or t
  misc_feature (453)..(456): n is a, c, g, or t
  misc_feature (483)..(483): n is a, c, g, or t
  misc_feature (485)..(485): n is a, c, g, or t
gaggagcgttgctcgaccaactacttctgcaagtaagaactatcctattacaatgaacacgctatctcgcgttcctccaggtttcagattccatcctaccgacgaagaacttgtagattattatctcagaaagaaggttgcttcgaaaaggattgatttggacgtgatcaaggacattgacctttacaagattgagccttgggatctccaagagaaatgcaagatagggtccgaggaacagacggagtggtatttcttcagccacaaagacaaaaaataccctacaggcacgcgcacaaacagggccacagcagccgggttctggaaagccacgggaagagataannnnatatactgcaagttgaacctcattgggatgaggaaaacgnnggtcttctacanannncgcgctnnnaatggacagaagtcagactggatcatgcacgaatacannnntgagaccaatgaaaacgctacacctcngnaggagg

SEQ ID NO: 698 - DNA, 789 bp, Pinus taeda
ctcttgccatcaagattgtgggtgccaagacagacgttttctatctggtttcagggatgtggaagaccccagcagaacgctgtttcatgtggatgggaggcttccggccatcagaaattctcaagatcctcattccacagatagaaccattgacagaacaacagtaccaatgcatttatagtctgcagcagtcgtcactccaagccgaagaagccttttctcagggcatggaagagcttcaacacactatttccgagaccatagctgcaggatccctcagctcaccttcaaacatggccaactacatggggcaaatggctgtggccatgggaaaacttgccaatttagaaattttggtaagccaggctgatagtctgagacaccagacattgcaacaactacacagaatcctcaccacgcgccagtcagccaaatgcttgctttcaataggagaatacaactctcgacttcgtgcactaagctctctttggtcagccagacccagagaatgagtattaatcactttgcagatcatcatttggataattaattaggttgggtccatagttttttcatcataatttgtactgcatggctaattttctaccatggaatcagctccaattttagaattagaattcatacaacattgtgcattattaattcgatttatgctctgagatcagagtctcctgctcatcacgttaactttcaccattgatgatcatgatctgtgacttttagacacctgcatgctactaatcaggcttgcagatagtgaattcttag

SEQ ID NO: 699 - DNA, 854 bp, Pinus taeda
ctcgtattaacttatttgttatttaacaggctgacaatttgcggcaacagacactacagcaaatgcataggattttgacaactcgccaagcagcgcgtgcgcttcttgctatcagtgattacttttctcgtctacgtgcccttagctctctatggcttgcacgccccagagattaaattgttaggaatcacatgctttgatctgtaccacgttgcagccctaggcaatgggcatagccacatctatgagcaatcctgaaagagcttctccatctctgacaggatggagttgatgaggggttgcgagggtggatgtattgaagatgaaatacagaatacatgcttcgaaccatgcagaggtttggctttgccccttggtattttgaaataactcttgtacaatgattgaaatcttgttaaatcattgttgtgggaggaagtctgaaatcaccctttgagaatccagctgtgtccgggataattctcagcctttcatattgaagaaattaagctaactattcccttgacatccaagataggattttcaaagctgagtaggctttatttctttgaattagctagataggaatgtaaagtatttagaagtaattatccagtataatcacacaaggttggatctcagtgaacaagaaacttttttctgtggtttcaaatgtaacataataactaggtcgacagtttttggtctattagcataaatcatttgtttggctgcagtgatcaagtaatctttcgatctcttatgcagggaagccatacttcccttgtttgtgagatgtgagaaaatctcgatccccccttgttcaatgatgaatacgacttgatattgagcta

SEQ ID NO: 700 - DNA, 773 bp, Pinus taeda
atggtactggtaggaacttcgacaatggcgcggacgggattcgaaaccgcgacgctcggcctcgaacgtaccgaggcgttcgccgccggagctgggggaagtgggtgtccgagattcgcgagcctgggaagagaaagcgcatatggttgggatccttcgaaacggcagagatggcggctcgagcttacgacgtggctgcgctcagcctgaagggaagatctgctttgcccaatttcccggattccgtccacacgctgccgcgcccctcttctttgaatcccagagatatccagctggcggctgcccaggcagccgccgaattaacgcagccgatggtctctaccgatatttcatcctggcaaccgcaagatcaaaatttatacgattctaataataatgtgaacaatgattcagtttctgcgtctgcttctgatcatgataatcatgaactctccagtgtttctatgacgtctcgcgatcgattctcgctggacgaagaattattggccttgcattctcccaactgggtaatggatatggggtgcgctggttctgatttccttgtatcgtcccctgccaactgcttcaacgagattgatgcatataattatgtacatgaactcaatgggctggaccaagagattttaccttcgagcatttttttctgaatgtctctgttaacatttctcataaatacgataggtatagcaggaatggcacacagtgatattctagttatgtatgggcacacagtgatattctagttattttgg

SEQ ID NO: 701 - DNA, 234 bp, Pinus taeda
  misc_feature (197)..(201): n is a, c, g, or t
  misc_feature (209)..(211): n is a, c, g, or t
ccagagatactggactgctggtgggtctctgaggaatgtgccggttggggctggtagaaggaaaaacaagccctgcttcggaattaatcacaggcagatcatggatgacactgaaactggttggaatgatgtgcagggccaggcttctcgtgggaattctgataaattggtcaaggttgagccattttatcctgaannnnngaaatttnnngagggcttgaatgaagcggcaac

SEQ ID NO: 702 - DNA, 651 bp, Pinus taeda
aatgaaaaccattgaggcgcttcaaagtcttcacatgacgattctacacctaaatatcaccactatcgatcagactgttctctactctttcaatgtcaagattgaagatgagtgccagttaacgtctgctgatgaaattgcaacagcagtacacgatatcttcaatatcatccattccaacgccatcaactaaacgtgcccacttagtcaacattgtctccatatgcttgctcttcatactcagtttaggtcttcagtacagattttctctgtcatatttatttcagttgcagaatgaggcagtgcgacgggttagtacagtgtgatcattctcttcttcttcaaagtaatgaacgccactgcaagcacaattaaaggccgatcaagctccgaattgtactatctccatactcctggttaattcaatgcatcatcctgaatcactgtgcatgattggcttctagctgtgtacatgacagtcatggccactctgagaaagagtaaacgtagaatatctgtttgtacgtgccctaccctattctttgactgtaaaactcgcaactcaatggcgtactgtatctactgcaaaacctattggttttatacaatacatagctatgagattctccacatttacctgctatgacagtt

SEQ ID NO: 703 - DNA, 751 bp, Pinus taeda
aagtagggctctacaggccgagagaaaagccgagagaagcccaagccctggagttctccaatgggtgcaacgtgggagagacagcagggaatctctgtgttaggtggcagtggaattgtgattaatgtcaccgtccgccgacctgctgcgaaatcgtatcctttcacggccgctgtcgggaagaagtactttgttttcctctgcagagttctttaggtcgaggcaaacacactgggagaatcagggaactcgcaattggacatcccaagggttttaaacattgtcatttggagggaattcctgcgcgttttaaccactggcatttgaattgatagagatattccaggtgaaggcaaagaagagtgttcacaatcgtggaagaaggtgaaacgaggacggtttgtgcaggtctgagggatcagcctcattcttcgtctgcaatcaggttaaaaggaaggatcaaatattaaattatggagggaatggaacatttttataagtaaatttaagacttgttttctgatccatgagacaaacctataatatgattccatgtgtatttggattatgattaaaaatggctcggattaaagatgaattagtaggcggtgatcaatgtacatttcttaatcagacatggtctttggaatgagcttgtttattattgatactttttttttattgacatgctttttccagtgaaaaaatggtatttgagacttacaatatgattccattctatgtctattta

SEQ ID NO: 704 - DNA, 793 bp, Helianthus annuus
  misc_feature (677)..(677): n is a, c, g, or t
ttttttttttttaatgctaaaacagagagatttattaattaaaacaaaatacaccacaattatttacattactgcccttgtaccttaaaacaactactccaaatcatcatcaagttaggtataaaaactaccggaccatccaccacccatcatcaacaatctccatccgggtcttcggattcgggtttcttattcaaatcaggcttttcttgaaaccaacaagccttcttcaactcagaactagaaggacaattatgatgatgctcaaacgtaccactcttatgcaccaacgtacaacacgtctctgcatctactctagccccaacttcaatagcttttttcctaatagaagccgtgctcagctcatccaagccgccatcagaagccatcaactccgggaagttaagccgagccgacggcccccgtaggtagtacacggccgtgtcatacgcccgtgcggcggctaagggagtcgaatacgagccgagccatatcctcgaccgcttattcggctcccgaatttcggctacccactttccccactttctcatccggatccctttgtacggtcgttgatcggactttctttttccagccgccggagaatagtttaagtcaccggagacgctgccggagaagggttttctggcttccatcgatttagtgacggatccagnaaattttttctatataaaaaagatatataaattctcgtaaggttttttggaacccgaaactatgggtagatccacccctgattggattgggatatttgtgttagagggtttttggg

SEQ ID NO: 705 - DNA, 804 bp, Helianthus annuus
tttttttttacaagataaatagttttcttcaactttattacaatcacctgtacatgattcatctttcctttcgaattagaaaaagatgtagatataaacaatataaaggacatcttcaaacttaaaaccttaagactcttcggatactacgctgcataaaagagtttgttacctgaaacctaagaactgaaatgagagacagcaaactattaactagactctgcagacgataggcccgcttcatgagagtaataaggtttgtaatagtgaatctgttctctttaaaaacacttgtacagttgtacccgattcgaatcacagcttgagattcaagtcaagtgttattggatctggatccggatcagatggctgcgaatccgccatttgcggatctaaataataacctccatgccacattctttcctgaccatgcacacggacccaagcgtctgcggctgctgcggttgcaactgcatacttattattattaccactggcttctgccactgctgtcccggtaatcggtctgtgtacaaccgagtgagcttgcagttgcacagcgagtgtccgactgtacgcaggcgtgataagcgaatgatatcttctagcagcatctctctccctcttgtgtgcattttggtgaccccctagtgcttgtgcactgtagaatttcctcttgcagaagtggcataccttcaccgcgaccggtctcgatggcgagtttgtttgtagcttgcctgaggctaagatccagcccctgttgtgatgctctccatcttacctttggtattcataagactgaag

SEQ ID NO: 706 - DNA, 774 bp, Helianthus annuus
aattcggccttatggcctcgcaacggggaggctgcgggtggtggcggtgcggcgtttgtgaaggtgagcatggatggagctccatacctccggaaagttgacctgaaaatgtacaaaagttatcaagatctctctgatgctttgggcaatatgttcagttccttcactattggtacctgtggatcacacgggttgaaagatttcatgaacgagagcaagttaatggatcttttgaacaattccgactacgttccaacctacgaagataaagacggggattggatgctcgtcggagacgttccctgggagatgttcgttgattcatgcaagcgtttacgtataatgaaagggaaggaagccatcggacttgcaccgagggctatggagaaatgcaagaacagacgctaaactcgacgaacaaactcaaccgcgacatcttgcttgttcggtctttgtgtggcatgcaacatcaagtatagtgcgcgatggaatgagcagacgatacggttcgtgtttgtacttattgttttataataaactctttatctggattgggaacttgattgttggttatattgtgagggtaatgtgtatttataaacttgggtgattgaaattcatggacataaataggcaagagaccaataaatatcattagtatgttctatgtactaccaaatctaaggtttttaccctttgttttggtgatttgttgtagtattatgtttaataatctatgtaactcatgttgtgaagcaaaaaaaaaaaaaaaaa

SEQ ID NO: 707 - DNA, 566 bp, Helianthus annuus
atggcctctgggcgggaagtggtgattgcggcgacatttactaacgcgacttacgagcgcctgccgttggaagatgacgtacgaagaaggggctgacatgcaaatacagcaaacttcaggggtcaatgctggaaatagtcctccatctggaggggctcctcctcatggtgataacataccatcttcttcaatggcgatttacaatcagccccctaaactattgccaaatggtcaaatgcatcaggatatgttttggactactcctccacgctcttcaccgtctaatttctagctattgtcaaaccaagttcctctcctttgtagaagaatagggtagaaactacaaaggtagaattttctttttcttggatgatattttgattagggtcgccaaccttgttttgttgtaatatcaatgtgacttatctatttagtttggtggtagtttgatggttttgaagcgccgttaaaaaaaggtaccggaaataaaatttcccggccggatgggcccaagggactatttactcgaaccaacttattggtggggcccccaatccagcacactg

SEQ ID NO: 708 - DNA, 374 bp, Helianthus annuus
ccggtctcattctgtgaagaaagcaggtcaaagttgcggatcaaagtttttgacaggatccgggatcgaaaacctccatgttcttgaagttttgctacaaatgatgtattgaagggggggtttggttggtggataaagaagtttggtgcttctttgtgtttaggttttagtccttttcttgggggtttctttttggtgaattatctccttttgaagggttcaagacaataataatgttgctggacatatattatataaaaagacaaaagggaaggggtgggggttgcatatatttatattattatatatttttgacgcacatgaaaaagagttaaccctttgatttttatatgtttaatcttttggttgatggc

SEQ ID NO: 709 - DNA, 737 bp, Lactuca sativa
cacccgggattcggactgatggccgctgacgggggaggagtaagaaccaagccaaatacgagaacgtttatcgggttcttgaatctcggcgaccgacttcccccacttcctcatcctgattcctctgtagtacggtttgtttgtttcaattgactgaatctcctttctcttagatgttgaacagcggccgtctacctccatgtttggcggttgtgattgtcgtatggttcatcttctgttgttgttcctgtaactggccggcgtaggtgccgccgttttgaagccttttctattcttccccagtatgttgattgtggtgactgtacctgggtttgtgagttctgtggtgcttttttctggtatgtctagacggccgttaatctatctacatctgcacatcggaggtataatcattgttgtaggggtgggagtgtagttcttccttatccttctaggtttccccctgatttttttgccctgtatggttggaaacgggagagcttccacagtaccaccacacttctcttgccattgccgatgacaaacacaaagccttgattacatgcagctgatcttttttatcagaatttgtacttcaagggtgccgctggaaccttgactttgcactacacatgtaaattttcaccatttgtttataacaattcccaaaagagcagtttacttattcttttcgattgatcagccaccgacgtcttgcctggatgatacctttgcct

SEQ ID NO: 710 - DNA, 490 bp, Lactuca sativa
aaagacaatgataccaaacattgccactgttaaatctgagccggaggtttttgtgggatcgccggagatttcaagttatgaaaatggatcgccgccgcagacggtgggagttgatgatgtgacgcaacagaaggggaaacattacaggggtgtgcgacgacggccttggggtaaattcgcggctgaaattcgggatccggcgaagaatggtgctcgggtgtggctagggacgtttgagacggcggaagatgcggcgtttgcatatgacagggcggcgtataagatgcgtggttctccggcgaactcatcggaagatcgatcgctcaagaggacaaagaaggtggaacaaatccacgtggcgaatagttagtggttgatggatgctgactgtaactgtggattaccttttttttttttttaatttcgtattttatcgtgtaaatagctgtttttttgtgcataaatgacaaatttattatttttttattct

SEQ ID NO: 711 - DNA, 760 bp, Lactuca sativa
agcagattacagaagaggaaagacgggttaaaacctataccgatggggtatgagagtatgaaagagtacaaagctgcaaaactaagggaattgaagccagttgtgttggataatcctcaatttttggtggaaaagaacgaaggtgatgacaccgaagatgaaattgacgagggtgaaggtaccaggggcattagagtgacccctaggaaccctaaaatggccgtgtatggccggaatttggaggatatttcacgatacttgaactccggcatgtatgatcctgaagctgccaaagatccagaaggtcctcgtaagttattttcaaaggaggagaaagtccttatgaataggcggactcctgatttggcgactgcgacctctgataaatggcaacctttacacactcttgctgcatcaggagaattttaccttgttgacactttgatgaaatacaatgtagatatcaacgtccccaatcaggagggactcacagcacttcacaaagcaatacttggcaaaaagcatgccatttgtaattatctattgagaaattcagctaatccatttgttcgtgacaaagatggggctacccttatgcattatgctgtacgcactgcatcaactcaaatgataaaaatccttttactttataatgtggatataaacctccaagataacgacgggtggaccccactgcatctagctgtccaatcgcgtagaactgatgtggtgaggcttttgttgatcaagaaagctgata

SEQ ID NO: 712 - DNA, 517 bp, Lactuca sativa
tcggccattatggcctgtagccggggattggatgctcgttggggaggttccttgggagatgttcgttgattcatgcaagcgtttgcgtataatgaaagggaaggaagctatcgggcttgcaccaaaagctatggagaagtgcaagaaccgcagctaaaagccgcaaacgggattaactacaatctttgtgtgggatttgggatcaagaatactctatgtggattgaacaaacatttgggttaatttgtgtatgtatttattatatatttttacatcaaaattatttcaagatctggagttttctattgttgattatattgtgaaagtaatatgtattataaactgtggtgatttgaattcgtggacataaaataggcacaaacaacaataaactcttgtataattaatatgtcctaccaaatttaaaggtttccgactctttaatttggtgctttgctttaatatatagtacaagttgttatttatactcttaatttagcgaaaatattgaatcatt

SEQ ID NO: 713 - DNA, 759 bp, Lactuca sativa
tcggccttatggcctgtagccgggtggaggaggcagtggctgtgaggcggagaccttaaaggtcaccggaaaacgtggctacgcagagactgttgatcttatgctcaatctacaaccaaatgaccagtcctcatcttcaactaatctaaatgatatgaagttgcagaactctaagaacaacaaagatttgatcaagccaccagccaaggcacaggtggtaggatggccaccagtgcgaaactatcgcaaaaacgtgatggctcagaagagcaataatgaggaaactgagaaggtggtggcagccaccaccggtagtaacaaccatgcggcctttgtgaaggtttcaatggatggagcaccgtatcttcgcaaggtggaccttaaattgtatgagagttatcaacaattatcagatgctttagccaagatgtttagctccttcaccatgggagagtatggatcccaaggaatgattgatttcatgaatgagagcaagttgatggatctccttaacagttctgaatatgttccaagctatgaagataaagatggtgattggatgcttgttggtgacgtcccatgggcaatgtttgttgattcttgtaagcgacttcgaatcatgaagggatcagatgcaattggacttgccccaagagcaatggaaaaatgcaagaacaggtgttaaagacaagtatgaagcaaaccctaatcttgattcagttcatgacaacttcaaatcatcaaagtacatggatggat

SEQ ID NO: 714 - DNA, 760 bp, Lactuca sativa
  misc_feature (688)..(688): n is a, c, g, or t
tgttgtgatttctaattcaagtgatcaaacgcaaccaaatggtgggtcattggcatttgtagcagaatattctcggtggttggaagagcaaagcaaacacataagtgagctaaggacagctgtcacttcacatagaagtgacaatgagcttcgttctttagtggaaaatgccacctcacatttcaatggtatttttaggctcaaaagaactgcagcaaaagccgatgtttttcatatcatttatggaatgtggacatcacctgcagaacgttgttttctatggattggtggcttccgttcttccgaattactcaagctacttgtgagtcacttagagccactaacagaacaacaattggcaagcattgatcatttacaacaaacatcacttcaagcagaagaagctctatcacaaggaatggatgcattgcagcaatctctagcccaaacattggctagtgatgcacccgttgtgccagctggatcttcgggtatggctaactacatgggtcaaatggccatggccatgggaaaactcggttctcttgaaaattttctccgccaggcggatcatttgagggaaaagacgttgcaacaaatgcatacgatactgacgactcggcaatcggcacgtgcgctgcttgcaattaatgattacttttctcggcttcgtgctcttagtacactntggcttgctcgcccacaagagtgagaatgaaggaagctgatttgtaaagtgaaaggagtgtattttatgaca

SEQ ID NO: 715 - DNA, 780 bp, Lactuca sativa
  misc_feature (661)..(661): n is a, c, g, or t
attgctacattcgaaatggagtatgaattgtggattggggaacaaaggaagaaggacgatgatcttcggaaagtgttgttgactcatactagtgatgtcgagcttcgtatgttcgtcgacactggattgaaccattactacgatcttttccgaatgaaggcggacgccgcgaaggccgacgtgttttatttgttgaacgggttgtggagaactccggtagagcggttcttccagtggatcggcggattccggccatctgagctcttatacgtaagcttccgccttccgctttcaatttcaattaaacaaataacattttagggtttgcattggtggcagatactgataccacaaatcgagctaacggatacgcaactggtgaaggcggggggtctccggcaatcatgcgagcaagcggaggaggcactgagtcaaggaatggaaaagcttcaacagacattagctcagagcatcacaatcgacataaccggagccggaagttacaccacacagatgaattgtgcactcgaaaggctcgaagcgcttgaaattttcttgaatcaggcggatcacctccggcaacagactctgcaacaaatgtatcagattttaacacttcgtcaagcagcaaaagcattgcttgcacttggtgaatactttncacgtcttcgtgtactgagttcaatctggtctggtcgtcctcatgatcgtggaactttactttcatgaatcaatctacttttttcgagttttcattagccgccattagctaatctagag

SEQ ID NO: 716 - DNA, 754 bp, Lactuca sativa
gaatctagagtgatgaaaatgatgaatcgattatctgaaattgggcccacaatagtcatgggtaaaaatgaacaactacacacatctggtcatgcctatcgtgaagaattggaagaagtgctgaggattgtgaaaccacaacattttttacctattcatggggaactcttattcctcaaagaacatgaattgcttggaaaatccactgggattcatcacactgctgtcataaagaatggagaaatgcttggggtttctcatttgaggaacagaagagttttgtctaatggtttcatagccctaggaaaagaaaatttacagttgatgtacagtgatggtgacaaagcatttggtacatctgctgatctttgtgtagatgaaaggatgaaaattgcaacagatggaataataattgtcagcattgaaatcatgcgtcctcaatcaaccgaaaatactgcattattgaaagaaacaattaaaggaaaaataagaataactacacgttgcttatggaatgacaatgggaagcttctagatgctcttcatagtgctgcacatgcagccctatccagctgtccaataaaaagccccttacctcatatggaaagaactgtttctgaagttttaaggaaaatggtaagaaaatatagtggaaaaaggcctgaagtcatcacacatgctattgaaaatcctattgctgttattgctgatgaaattagtgaaaaagtatctggtgtgaatgtgaatgtgaaag

SEQ ID NO: 717 - DNA, 708 bp, Lactuca sativa
tgttggacccgggattcggactgatggcccgaatgcgggccgtttaaattctatccttctcaagatatagtttgtttccttcggaatctctatgttctccatgcaaccaagcctcccttgaagaattgctccatagaccatactgacaatctttctcttgatgaacactagaccttcctccatgttccgttgataactgatctgtcggccttgggttacgaatatcaaacatgatatcgtccagaattatccccagatgacccattctcgtaaatatcagattgccctgaagacacaggagctcgatcagtctgtctttactgttcggtacatctgcaagtgagatttaacatgtgacaaagctaaatctttcacatccattaactcaagaactgacttgggtgttgctctttcatggccgcctaaaagctcaacagcatggacaaagcgagcatgaagggtagtcgtccagcgcatcctcggagccctcatactgcgtttggaggggaacctcgatgataaaaatcttgatcggacaatattgataatattattgctatgaattatagaactggtggtcgtataattagtgcaagaatctaacgaaggctggttcttatgatgcggattgcgcattatcgcgaaattgggaggggtattctggtaatcaactcgaattcctcttataggactccagaaacctaattt

SEQ ID NO: 718 - DNA, 770 bp, Lactuca sativa
ggccttatggccgcttgacgggggtgaaagaagaatctccattttctgcaagaatcaaggttgaaggttctagcactgttaatccatcaacaggggcaggtaagagaacatcaagcattgtccaaagtgacaaaggtggtgatggaatcaaaatagaagattctcatgcagacagaagctttggagagaaaaagctaagaacatcagtagaagaagtcccttctattactgaattaactggctataattttaagagacaagaatttgaagttgagtatgataatgatgctgaacaattacttgctgacatggaatttaaggaaacagatactgaggctgaacgtgaacttaaacttcgtgtcttgcgtatatactcaaaaaggctagatgagaggaaacgcaggaaagacttcattcttgaaagaaatttactttatgctgacccttttgaacagggtctttcccctgaagaaaaagaaatatgtcgtcgatacagagtcttcatgcgttttcatacaaaagaagaacaccaagaactgcttaaaactgttattgaagaacaccgcattcgaagacgaattgaggatctacaggaggcacgagctgctggttgtcgcacatctgcagatgccgaaagatacatcgaacaaaagagaaaaagagaatctgaagaaaacgcccgtagaatctataataataggaataaccataatatcgacgatattaataatatccataataataatagtaatagtaatatacagcctggc

SEQ ID NO: 719 - DNA, 676 bp, Lactuca sativa
ggatcattcaagcaatacaaatttttatacttttccttgttctacttttcttctaacatcaatgagggctaccaagaacatgacaagttcttgcaatgaagaagagtttgatcaattgaaaagagggccatggacacttgaggaggacaatcttcttatccgttatatcacttgtcatggtgaaggccgttggaattcgctagcaaaatctgcaggattgaaaagaacaggaaaaagttgtagattaagatggttgaattatctaaaaccagataccaagcgtggaaatctcacaccacaagaacagctcttgatcctcgaactccattcaaagtggggcaatagatggtccaaaattgcccaacacttgccgggaagaaccgataacgagatcaagaattactggagaacaagggtacagaaacaagctcgccaccttaagatcgactgtagtagtaagaggtttgtagaagcacttcaccaattttggataccaaggttgcttgagaaagtagagcaaacctcatcatcatcatcagcatcaactgcttctacttcgaccatggaaaccgaacaaaacaaattaagttctcattcacaatccgaactgaccctatttgcagtatcgtctccaacgacaaaccaagggtctactaactcaagatcaagcattcgt

SEQ ID NO: 720 - DNA, 717 bp, Lactuca sativa
gggaaagagagagagaaagagtttttagagagagaaaaattaagatctgcgtttgtgtttgttgaagaagatgaagtcctgcgaactttgcaaatctatggctaggatctattgcgaatctgatcaagctagcttgtgctggagctgcgattctaaggtccattccgcgaacttccttgtagcaaggcattcacggagccttctttgccgcgtgtgccagtctccgacaccgtggactgcttccggcgagaagcttgggccgtcgactgcgtcggtttgtgagaagtgtgtcgttgacgctacttctgatgacgatgaagacagagaagagagtcagggaggaaataatgatgatgacgatgagtacgacggagatgaagacgacgaaaatgagcttgacatggaagatgaggacggagatgattttcaggtggtgccgttgtcttctacaccgcctccggcagcgagttcctccagcagtgaagaattttctaatagcgatagaggcattttaatgaagcgaaaacgcgagaatgtagcagatctttcctcagaggatgatgtggattgctcatcggttcagaaaaaccagcgtacggcggagggtaacagagtgacattgcatcagtttttcccttcgagttcggaggcgatcgtggagagacttaagaatttccggcaccggaacaagatctccggcgatacaagcctggaccg

SEQ ID NO: 721 - DNA, 686 bp, Lactuca sativa
  misc_feature (632)..(632): n is a, c, g, or t
atgcaagaaaacaagaacacaaaatggactaacgaacagaacacatggttcgaaagtgctcttgctatattcgataccgatacaccagaccggtggtcaaatgtcgccgctttagttcccgggaaatcagagatcgatgtcaagaaccaatacgagaaattgaaagccgatatcaatgaaatcgaggctgatatggttcccgatcccggctatttcacctcgtcttttgaagatcacagcttcagtatcttcggaaagaggcctcgatcttgtgatcaggagagacgtaagggtgtcccatggaccgaagaagaacacaggcgattcttggtgggtcttcaagttcatggaaaaggagactggcgaagtatttcacgtaacttcgtgatgacaaaaacaccgacacaagtcgcaagtcatgcgcagaaatactacgcgagacaacattcagatgggaaagagaagagaagacctagtattcatgatatcacgatcatcaatcatcctgacaacagcgagagatctccaccgtcgattaacaaacccactggactaccaaaggacatgctacactggaataacccgagtgatgaaactgtaacatcgatggcgtatccatttgagattgcganaatgaacaagaatgtccgagtttacaactccggactctgtttgcaactacagac

SEQ ID NO: 722 - DNA, 673 bp, Lactuca sativa
  misc_feature (574)..(574): n is a, c, g, or t
gattacacacaccatatcctcctcctcctcctcctcctcccactttctctctctctgggtctctctatcaaacacacacacttgagtgtgtttgtgtgtgaaaaatgggaagagcaccctgttgtgcaaaggtgggtttacacagaggagcatggtctgatgaagaagataagctcctcacacagcacattcacacccatggtgaaggtcaatggcgttcgttgccttctaaagctggattacttagatgtggaaagagttgcaggctgagatggatgaattacctccggccaggtatcaagagaggaaacttcaccgacgatgagaatgacatcatcgtccggctccattctgtccatggcaaccggtggtctttcatagccacggaacttccaggtcgaactgacaatgagattaaaaaccactggaactcgcatcttaaacggaaattgcgcggcggcgacgttgacggagacgagaaccaggaggacttttccaataacaacaaaaagccgaagaaaaagcgaaagacgaatcagaagtcaacgaaatccaaaatcacagagaaacctanagaaatcatttctcatcctgctgcttcgtcgtcttcgtcatctcaatccgcatcgttgactttgagaaagatcacatttcgatagcgtagtgatgagcg

SEQ ID NO: 723 - DNA, 709 bp, Lactuca sativa
ggccgacagaaatggagattgatccacaatatccagaacctgaagcagacaaaactgaaatcattaatgacgacgatctcttcagagccgccgacaacggcgacgtttcatttttcaaatccctctctcagccgcagctgttccgttgtctcgcgcttcgcaacgaagacggacgatcgctacttcatgtcgccgtttcttcagcccgcaccgaggtggtgaagatacttgcagcttttgatcactcaatcagtggcattaacagtgctgatgaagaaggttgggcaccacttcattctgcatcaagcagtggaaatgttgagatcgtcaagattttgctggatagaggagctgatgtaaacttgaaaaacaatggaggtcgcactgctcttcactatgctgcaagcaagggttggttaaaagtagctgaaattcttctttcaaatggcgcaaagatcaattcaaaagacaaggtagggtgcaccccattacaccgggctgcaagtacagggaagtcagagttatgtgagcttttgattgaagaaggtgcagatattgatgctgttgatagagcaggacaaactcctattatgagtgcagttatatgttataacaaagagatagctcttttactcatcagacatggtgcagatgttgatgttgaagataaggaaggatacactgttcttggtagcgcatcagatgaatt

SEQ ID NO: 724 - DNA, 613 bp, Lactuca sativa
ggttgttaataagctctttttatcttgcgaataattcttaaaggaatctaaatcatcaaaaggaaccgaaagagacttcatgctagcttttgctccatgaccgattaacagcatcgccacctgaacatgccctccctccaccgccctatgaagcggcgtgtacccactaccatccaccacatccacccgaccaccatgattcagcaataccttcaccccttcaaaacaacccttaaaagccgttttatgcaacgccgtccacccattctgatcccttccgttcaccttcgcaccttctgctaaacaattcttcattccattcacatctccttttcttgctgatcgatgtaaaacatctcccaaatgtaacatatcgtaaagatctgtatgctcgttttcaactgcaagatcgaatgcagtctttccttctttagttaccgcatatttcacataactgatacagtttagccggaattcaaccgcttctgaatgaccttccatagaacagcaatggagggcagtccagccgttgtgatcggctaaatcggggtcgcttcctagagtaatcaagaactcaagtactttcatatagccatgacatgcagcaacatga

SEQ ID NO: 725 - DNA, 737 bp, Populus tremula x Populus tremuloides
ggagcaccatccttatttgttttgtgttgttttttttttttaatataaaaaaagaaaacgtgccatgctttgctattaatatatcggtactccaatcccttcaatactatcccagaagctttacttctattgttttctcactaaattcctattggcaactttgcaatcttcgaagtatttcctccttttcgctatggctgactctgaacattcttcttctgatgaaacttttgcgtattcgagagaggaaacaagtcaggaaacaagtcaggaatcaaggcttgaattctctgaggatgaggagacacttataattaggatgtttaatctagttggagagaggtggtctctgattgctggaaggattcctggaagaacagctgaggaaatagagaagtactggaacactagatactctacaagtgaatgaagctgtaaaagcacaagttatgctttctttacctctgctagagcaagttctgggtctgtcattcataagcagaagatgatgggttaagttgattctagctgttctgtagctatgctgtgtttcatgcaactgttgtctttgattgctgaaggaactgcaatctttttcttttttttactgcctctatgttctttcttgtgcatcggtaagtcttgatgtaccaaatcttgttacaagaagtggcttgattcattggccatttcttgattttcagataagacttcactcctcctcaaaaaaaaaaaaa

SEQ ID NO: 726 - DNA, 672 bp, Populus tremula x Populus tremuloides
ttttttttttttttttttacaaaatagtagcagctttactgcatttagtgaaactactaagggcatcatatctcattgatcaagaccaattagatttagaaacataagagtatgatcagtactagatcattagtaataactaatacaatcctcatctaaggagatttttcttcttcttcttcttccttctctctggattcagaatgatgggacaatgccatatcctgtttccgccattagtgtggaggagaacatttggtcatcttcgacttctgcatcttttctctttgcaaatcggccttttatccggggtctggtctctgcataggccttccttgaggcatacctgattgtcttctcaaacttccttgtcttctttttctctctgtatctcaggactcttgcctccctatccattggactaagttgaggtggcatctggatagcagtgctggagaaaagttcgagtgtcccttttggagttctatgttgcgagattgagatctcgctcactgttgattctggcaccactccaacatccatggatgacatggatacactttgactgatcgaaccattgtagctgtaagcagcttttgagggctcatactccaatcccaactgaaaattgtgatactgccgttgctgttgatgatcctttccttctccata

SEQ ID NO: 727 - DNA, 1313 bp, Populus tremula x Populus tremuloides
gcaagaaattattagcatcgtcaacacgaagaaaaggagcatagagagagagagagagatagagagagagagagagaagaagaagagggtttgttgctcatttttaaggactggaggttttgtgaaggatcgatgaccagcataatgggagcagaaccagctggcacctacagcatgatgaattttgaagagactgaactacgcctagggttacctggaggtgttagtaacggaaatgattctgaggctgcaaagagtaatgggaagagagggttttcagagacggttgacttgaagcttaacctttcaactaaagaaactggaaaggatggatcagatcaggagaaagtagtgatgaaggagaaaactgttgctcctcgccctaatgatcctgcaaagccaccgtccaaggcacaagttgtgggttggccacccatcagatcattccgtaagaatgtcatggccgtccagaagaacagcaacgacgagggtgaaaaggccagtagcagcggcgctactggtgcagctttcgttaaggttagcatggacggtgccccatacttacgaaaagtggacttgaaactatacaagagctaccgagaactctctgatgctctaggcaaaatgttcagctccttcaccatcggtaactgtggctcgcaaggaacgaaagatttcatgaatgaaagcaaattgatagatcttttgaacagttctgagtatgtgccaacttatgaagacaaggatggagattggatgcttgtaggagatgttccatggggaatgtttgttgattcatgcaagcgcttgaggatcatgaaagggtctgaggccattggactcgccccaagagctgtggagaagtgcaagaacagaagttgaagtgcttttttccaaggttaatatgatggtcagctgatcccaactgtccacaaagaaaaggaaacatgcaggctcatcgagctttgaagcctggaagtctctgcaccatgatttttcttttttctttttacatatatgtagtaagtccaagtataagaggaaatatatttgaagggatttgttaattatagctagctaggggcatgaagtaacaatagaagaagaagatgtgttcgtaaaacttctttttattctgtatgatcatgtgtaatgtttattgtcttgcttaataatgaccatcattattgtttctagctggctaggttgtcgagagcgtgttctgtcactctccctccatttctgtaatggtggcatgatgagattctctgcatgatatatacgaaatctttggatcaaaaaaaaaaaaaaaa

SEQ ID NO: 728 - DNA, 1178 bp, Populus tremula x Populus tremuloides
gagggagtgatcagtttctcagaggaaattattgaggtaaaacgtaatctcatcatggaagtagagaagggaacaaagatgcggtttgaggagacagagctaaggctagggttaccagggaatggtggagggggtactgaaggaggagagttcgcaaggaagagaggattctctgagaccgtggacttgaagctcaatctttcttccaaggaggggggtattgatccaaatcatgagaagactcgaagggagaagaaccttctggccactgatccagcaaaacctccagctaaggcacaggttgtgggttggcctccagtcagatctttccgaaagaacatgttagctgtccaaaaaagcagcaccgatcaggagagtactaacaaggttcctgggggcaacgcaacctttgtgaaggttagcatggatggcgcaccttacctccgtaaagtggacttgaacatgtacaagacctaccacgagctctctgatgccttgggcaaaatgttcagttccttcaccataggcaactgtggatcccatggaatgaaagatttcctgaatgaaagcaagctcatagatcttcttaatggcaccgactatgttccaagttatgaagataaggacggtgactggatgctcgtcggtgatgtcccatgggacatgtttgttgaatcatgcaagcggctgcgaataatgaaaggaacggaggcgactggacttggtaatgagtatacagcataaaaataaaaccaaaatgattcttctcgtttacctcctaatacaagttttgttttgccttttctcatttcatcagcaccgagagccatggagaaatgcaagagcagaagcttcaagtagtgagcaccacagcctgctccttcgatctcgagggtcgcatgcagggaccaaaaattaagatggtaaaagcgcactggatggattgagcaggctcttcgtgagggtgtttctgcattaatattaattgtacgtggtttgttatataatgttaattttgtgagatgctacttgatccttaatatttatcatggacaagaacgataataactcctaaatatgttccaaaagactccgttatatgtatcttgtttgttcagttgaatggcttgcttaattattcattattatagctaaaaaaaaaaaaaaaaaaaaaaaaa

SEQ ID NO: 729 - DNA, 1206 bp, Populus tremula x Populus tremuloides
gggggaagcccaacttatattattgaggtctctctctctctctctctagcttgcttgcaaaacatagaagaggacacaagaaataagaaacaaagaaacgagcaaaagctagctatcaacaacaccaaaagcaacaagcaataatacaaaacatatcagatcttccactaaaaccattcattggcgcgcgcgtggcagagagaaatggcaacagctaccgtgttaggtaccgagagggcagatttgaactacaaagcgactgagctgtgtctaggattgcctggtgctgttggtgtcaaaaatgaagttgagacacctaataaggctaccgggaaaagagggtttgctgagactgttgatttgaagctcaatcttcaggctaaagaaggtgtcatggatctgaatgagaatatcaacaatattgcttcagaggacaagaaccaccttccttctgccaccatcaaggaccctgctaagccaccagccaaggcacaagttgtaggttggccaccagttagatcttacaggaagaacgttttggctcagaagaacgccagtgaggaaggtttcggggcacaagttgaaggttggccaccagttagatcttacaggaagaacgttttggttcagaagaacgccagtgaggaaggtgagaaggcaagcactggcggatgcagtgcagcttttgtgaaggtttgcatggatggtgcaccctatcttcgcaaggtggacttgaagatgtacaagagctaccaagaattgtctgatgccttggccaaaatgttcagttccctcaccatgggtaattatggagcccagggaatgatagactttatgaatgaaagcaagctgatggatctactcaacagttccgagtatgtgccatcctatgaagacaaggatggcgattggatgcttgtgggtgatgttccatgggagatgtttgttgattcatgcaagcgcccgcgcataatgaaaggatctgaagctgttggacttgcaccaagagcaatggagaaatgcaagagcagaacctgaatcttatgtactcaatgtattcaggttccctgctggattccctctttttagccttgcatccatgtatgaagactagcaggcaaggcacttgcgcaacatggatggatcagtagtggtgtttctttggatgtgtctttactcttctttttttattattattattgctgc

SEQ ID NO: 730 - DNA, 710 bp, Populus tremula x Populus tremuloides
ttttttttttttttttttttttttaaatcaactcaaaatgaaagtttctcaactttcaaaatcatttcgagattgtcaagtacaaggacagcatattctaaacttgccattacaactgtggataaaatgaaaacaggaagacgatcatcaggctacaaataattaacattgatgcatactgtacttgaaggactcaaattctatgctctaagatgattagtatgaaagaaagagcagtaccatgatacatctgagactacaacaagaggaatgcagaaaagagaagctattttgagcactagaaacaagaagcactgctggatgtggaatgagcctttgtgatttttgtgcagaactcgagttcagatgcaaagcagattcactctctcggtcgcgcaagccagagggaactaagagctcgtaaacgggagaagtaatcgtgtattgcgaggagagcacgagcagactgacgggtggttaatattcggtgcatttgctgtaatgtttgctgcctcaaattgtcagcctggcgaataaatccctcgagggtgcctagttttcccatggccatggccatctgacccatgtaatttgccacgtttccagatgaacctgaggagccaagaggtccgctggacaatgtctcagcaagggactgctgcaatgcctccatcccttgagataatgcatcttctgcctgttgggaggac

SEQ ID NO: 731 - DNA, 415 bp, Populus tremula x Populus tremuloides
ataaaaaaatattaatttaatatacatttaaaaatatatatatttaaaaacaattcctttgatttttggagtgtcagtcatccgagccattgaaaaatactttttccattgctggaccgtcattttttaggtccagccaggttggcagccacctagcatctgggaagcacagcccaatagtgttgtcctccagtccagataataaccatacattcgatttcttgcctgattcttctccgccgaaagaacctccttcggccagtaaaaccattattcacgggggggggttcaaactgaaagacaaaagttcttccacggaaaatttgaactacaaagaattgtaagagaacctatattataaaggcatataaatgatagcctattacaacttctataaacttgtccttcgattatt

SEQ ID NO: 732 - DNA, 621 bp, Populus tremula x Populus tremuloides
gggagttttattggctgtctattagatggctctggtgatgaagatttcatgtctggaacagcgtgctttaatcaaaatgcaaactatttactcaaccagaaaggaggttcaaatgtgcctaatttacagcatgataatggtttctctcactctcccaccactctatggagcaactcttctagcaaaggaggaggatggcataacagctcaagagatctagatggactgaagggagaagctctatcttctcaacaagtatcgggaaataaactggacggagttggttttgctcaatcaagaagctttacaggatccaatcaagaactcaagaatccaatcctggagatttccttagggagaccagagtactggcaaaacgaagaacatgaatgatttaagatagagttgtgctggctaacaatggcatggtatttagaattccctttttcttaaacaaaaagaaaaggatcatagatgatataaatagatatagggctttgcaaggggagaagaagaaagtcttgttctgtcagttcagtgcatgtctgtctgtatattcttttttagaccattgttggactatgttatgagttgatgttagtcattacatggtgtattcaa

SEQ ID NO: 733 - DNA, 129 bp, Populus tremula x Populus tremuloides
attttaagcttgtttagcttccttgtttcctcgtagcttttctttttccaagtgtactttaatgtgtaaatgaatggattgcttgtgggtaacaagtctttggctctcaaaaaaaaaaaaaaaaaaaaa

SEQ ID NO: 734 - DNA, 520 bp, Populus tremula x Populus tremuloides
ttttttttttttttttttttaacgtgaaaagctttgatcttaaaatgcatttcaatgggttcttacagaacattgaggcaatgcagactgtctacaagaagaaaaaagacaagcaacaaagaaagaacctaaataaataaaaagcaaaaatatacaaaaagaaaacccaaaacttttctcgtatatgtattacgatacagcttcattctataacatgcgatgacttgaatatacaactcaaagccacgccttgcatatccaactttatctctaagcagcactgtaaactgcattgagggtgcttaatggaaaaaactgaccagcttaatgtgcccgtgttcacaatggccctgccatctattgttagctcttgattataggtgcttgttttccatgatttggcagttgacctgtccacagtatccaatgttgtctgagcacctgacttcacaaaaatggaagttttgagggtaaattgtccccgtttagctatttaacacgagcctagctctgccgggat

SEQ ID NO: 735 - DNA, 179 bp, Populus tremula x Populus tremuloides
tttttttttttttttttttttttttttagggaataagaagattttttaatacaacaatcaaaacgtggttcccgttgtaccccaagttccaagttccaagttccaagttccgagttctgagttccgtctgttccgagtttcaccagagtctatggttacagctcttaactcttctatta

SEQ ID NO: 736 - DNA, 736 bp, Populus tremula x Populus tremuloides
ttttttttttttttttttttttaaaaaggtccacaacactagcatatactgttatcccctgaactgaaaaatgtcactagttaggaaattcgctgtggagagtttgattctttgctagacggacagtgttaacataagccatgaccataaatgtttaccccaaagaaaacataacttgagctccaaactttcctggtcttcagtgactctgcatcatctcatgggatatgtaacttctattaaggcttactgcatcatctccaggagcagcaaactgtctattgcagtaaacatgttcaattggacgcaggatcggctgacaatgctgttgtttcatctgttcttggtcgtttcactggtgctaaactggtcttctcttcgtttttgtctacaacctgacagtttctgtcctctggtgccttttgctttctgcttatagtctgggagctttcttctagtaaagcacttgcattacatgtgtcaaaccttgttttgacacagtccaaatccgaggcttctaatttgtcatttgcaggtgactgctctaactttgattcttgaagggaagggtcgttttgggaggggggaggagcctttgacctgtcaccctccatctttttttgtttctaaacatctcttgaagatacctcccctgttcctcaaccctcaattgtaaatttctctggatctcaagttgttcgtggagttgcttctggacttccatttgcaatctcaa

SEQ ID NO: 737 - DNA, 481 bp, Lotus corniculatus
  misc_feature (164)..(164): n is a, c, g, or t
aaaatcccaaaatttggtggaccagtggatggcatgtggctcaaaggagcaggaagtggcatacacacatctcagataattacaaatgggattgaacaaacacaacaatactactactagcaactctaaaaatttctcatagtgtatttacacgaccccacatngcatccttgtcagcattaactgaccaataactgctcgccaggtgtaacctgtgccacttgacttcccacttgccccgttttcaatcccacctgggcagtcaccaccaccttcttcctcttcgccggcgacccactctccgacgaagaagagcaactctccgacgaagaccgcttcgaagccactctaaccgggtcgggttcaccggagtttacccggagcggaaaatttagcatcgccctcgagcccctcatcctgtacgcagctcgatcgtaagccaacgcggcatcctcggcggtctcaaacgttccgagccaga

SEQ ID NO: 738 - DNA, 572 bp, Lotus corniculatus
ttttatccaagttcatgaacctgcactcctataaatatcactcttccctctttgtttttgaagtttcaaaattcatttcaacacctgctttcaaaaataaaaaaaaataaaaaaccttactcaactcttttctttctctccaaacacagcacaagacacgaaaacattacggccacaacatgcacggagaaagtacctacgattccgatttggccatcttagaatccattcgccgccacttgcttggagaatccgatatatgcatattcggagccccgatttctaattcgggtaacccgccggtttacgttcggagctccagtttcagcaaactgtacccgtgtctgactgacaattggggcgagcttccactcaaggaagacgattcagaggatatgatgctctacggcgtgcttcgcgacgccgtcaacgaggggtgggtcccatctctcgattcatcgggttttcttcccgtcaaatctgaaccggagcttttcccggcagtgcagagcccaccggagcgggttgttccggctccggtgattcctaaggaggaagtcatgccggcggct

SEQ ID NO: 739 - DNA, 566 bp, Lotus corniculatus
ggatgaaaacttcaaataaaccattgatcaattacaaatacacacctcactgtacaatgcaagccctgccaattaaccatttcatgtctgaagagaacgaaaattcaaagatgaaagatgctaatgacttcagagtgaggacatcgatagatgtaaatgtttgagcatgatgtgccattgctacaaaaatactaaagggaagcctggtacatcaaagctcccactatgcgcaggtccggagaaggttacgaccaattagtctattgtacgcagccttaccttgttgttaacacaagaagccttctattatttaaattgaacaagacactttttttttttcttaaagcctcagagtgagatcaggagatgtagatgtctgtgcaggaggtgtagtttctacaaaactaggacttgaattatgagcatgttgttcatgttcatgccccaaattaacaccagcccttgcatctatctgcctgaaacttccaggccaaaacagaccaacatcaccatcttgcatgaacattggtgtcccgaaacagtagtctttctcaaatcttgctgca

SEQ ID NO: 740 - DNA, 592 bp, Lotus corniculatus
aatcccaaaattcttagagagagaaagagaagtttagagagaaaaagagtgaaaaattcatcatatggagaagatgatggtgtttgaggaaactgagctgaggcttggccttgggttgcctggaaatggaggcacagcagcaggcactggtactgaaggtgctgctgcagaaggagctgtgatgagaaagagaggattctctgaaactgagtcgactgagactgaagaaacagcaaccactactgtggatctgatgcttaacctttcccctaaagaagcttcttctgcttcggctgctgctggtggggcagatccacgtgataagcttaagacttcttcgcctaaggagaacaccctgctggtctctgattctgccaagcctcctcctgctaaggcgcaagtggtgggttggccaccagttcggtcgttccggaagaacatgtttgcggcccaaaagagcagcggagatcaagagagcgagaagaacagcagccctaatgcaagctttgtgaaagtgagcatggatggagcaccttacctccgcaaagtggacttgagcatgtacaagacttacaaagatctctctgatgcc

SEQ ID NO: 741 - DNA, 529 bp, Lotus corniculatus
  misc_feature (113)..(113): n is a, c, g, or t
  misc_feature (118)..(118): n is a, c, g, or t
gacaagactcactaaacaatcaaataaagaaagccaagtctataacaacatagtaatttagagtcattattgttcgagttcataatcaatacttaattagactctctcacatngtttngtttggaacattaatcatataacaaagtaacaaaccatattgatacacaaactataatgtaacaccctgctatgctcatttgtgtctgctgcagcttatcatggtattagttgtacaaaaccaaactgggcaccacaattacaaaggaaaggagcaggttctcaattaaactggtaccacttgtctagctagctagctcctgttcttgcatttctccatggctcttggtgcaagaccaatggcttcctttcctttcatgatacgcaaacgcttgcatgattcaacaaacatctcccatgggacatcaccgacaagcatccagtcaccatccttgtcttcataggttgggacataatcagagctgttcaatagatccatcagcttactctcattcatgaaatccttcatccc

SEQ ID NO: 742 - DNA, 603 bp, Lotus corniculatus
tgggtcgggccccccgaaacactagtggtattcacaaaagtttactcaccatggagctggtagtctcatcatcaacaacaacaaggagatcaagatggggtttcatgaaactgagctcaggcttggaattggattgcctgctgcagcaaataatattgaagaagttgtgaggaagagaggcttctctgagactgaatctgagactgacacagtggatttgatgctcaatctctcctctaaggaaccaacttcagctggggcagatccaagtcagaaacccaagactaatctgcagaaagagaagacacttttgcctgcagatcctgccaagcctccagccaaggcgcaagtggtgggttggccacctgtgcggtcgttccggaagaacatgttagctgtgcaaaagagcgttggagaggagagtggtggtgagaagagcaataatggtggcggcggcggcggtgcgagctttgtcaaggtgagcatggatggagcaccttaccttcgcaaagtggacttgaagatgtacaagagttacagagacctttctgattccttggccaaaatgttcagctccttcaccattggcacttgcgagtcgca

SEQ ID NO: 743 - DNA, 573 bp, Lotus corniculatus
agctccactttcttatcactgactctgtttctgtttacttgttgtttgtctattctgatttctgactcaaagaagagaagtaatgacaagtgtggtggtggatgcagagagagacaagtatagcatgataaactttgaggaaactgagctgcgactagggattcccggcgccggtgagtctggtatcaagatcggtggtggtagtggtgggaagagaggcttctcagagactgatgctaatgtggatttgaagcttaatctttcttctgatttgggctctgcctcttcctctgtttcttcaactctgcctccaaacaaaggcaaggagaaaacagctgcaacaacacaagctaatgacccggcaaaaccacctgccaaggcacaagttgtgggttggccaccagttcgatccttcaggaagaacatcgtgaatgtccaaaagagcaacaacaacgaaggcgcagagaaaaaggtcaccaccaccaccgccacaaccaccgcaggcaacagcgcagcagcagcagcatttgtgaaggtgagcatggacggtgcaccatatctacgtaaggtgga

SEQ ID NO: 744 - DNA, 542 bp, Lotus corniculatus
ctacggaaaacattgacatttattagttactggtcaagtatggaggcactggacaaggtcacatgtttgttcctggaaacaaaaacggggtcatatataaacattttctacattgtcctccctaaggaatttccaactattttctcatgcatataatacacatatacgaaattaaattttacaaaaaagaaaaagatggcacagacacataataataattaataacaataacaatgtaaattaaaactcgatcttattcctcctatatggcttgctcgaaccaatttgcttccttgggacgcagaggatcaacactatcaattcagcttctactcttgcacttttccactgcccttgggcgctagcccaatggcttcagaacctttcattatgcggagacgcttgcaagattctacgaacatttcccagggcacatcaccgaggagcatccagtcaccatcctggtcttgataagtgggcacataatcagagccgttcaaaaggtctatcaattggctctcattcatgaagtccttcatcat

SEQ ID NO: 745 - DNA, 496 bp, Lotus corniculatus
gtgaaaattaagtaaaatacaaacgatatataggtacaacagacaagcacattatggatcagcttactattatgcaagcacacaacaagtaaagaaataaagtcttgcgacataattcagatcgagtcattatcgtttctgttcacaatatatacttagaattaatctcacagttgggtttggaatattatataacaaaccatattaatgatacacaaatataattaactatatttttaacaccctgctttctttgtccatccgtgtctgctgcagcttcttcacctgacttgattcagttactaagtcaacttggaccacatggaatatggagcagttgcaatggtaacgactagtctagctccggttcttgcatttctccatggcgtctggtgcgagtccaatagcttcctttcctttcatgatacgtaaacgcttgcatgattcaacaaacatctcccatggtacatcaccgacaagcatccagtcaccatcc

SEQ ID NO: 746 - DNA, 413 bp, Lotus corniculatus
  misc_feature (43)..(43): n is a, c, g, or t
  misc_feature (50)..(50): n is a, c, g, or t
  misc_feature (53)..(53): n is a, c, g, or t
  misc_feature (56)..(56): n is a, c, g, or t
  misc_feature (63)..(63): n is a, c, g, or t
  misc_feature (74)..(74): n is a, c, g, or t
  misc_feature (76)..(76): n is a, c, g, or t
  misc_feature (79)..(79): n is a, c, g, or t
  misc_feature (81)..(81): n is a, c, g, or t
  misc_feature (85)..(85): n is a, c, g, or t
  misc_feature (89)..(89): n is a, c, g, or t
  misc_feature (95)..(95): n is a, c, g, or t
  misc_feature (102)..(102): n is a, c, g, or t
  misc_feature (110)..(110): n is a, c, g, or t
  misc_feature (116)..(117): n is a, c, g, or t
  misc_feature (122)..(122): n is a, c, g, or t
  misc_feature (126)..(127): n is a, c, g, or t
  misc_feature (131)..(131): n is a, c, g, or t
  misc_feature (147)..(147): n is a, c, g, or t
  misc_feature (151)..(151): n is a, c, g, or t
  misc_feature (157)..(157): n is a, c, g, or t
  misc_feature (167)..(167): n is a, c, g, or t
  misc_feature (175)..(176): n is a, c, g, or t
  misc_feature (183)..(183): n is a, c, g, or t
  misc_feature (187)..(187): n is a, c, g, or t
  misc_feature (191)..(191): n is a, c, g, or t
  misc_feature (198)..(199): n is a, c, g, or t
  misc_feature (204)..(204): n is a, c, g, or t
  misc_feature (206)..(206): n is a, c, g, or t
  misc_feature (214)..(214): n is a, c, g, or t
  misc_feature (217)..(218): n is a, c, g, or t
  misc_feature (223)..(223): n is a, c, g, or t
  misc_feature (225)..(225): n is a, c, g, or t
  misc_feature (245)..(245): n is a, c, g, or t
  misc_feature (248)..(248): n is a, c, g, or t
  misc_feature (251)..(252): n is a, c, g, or t
  misc_feature (258)..(258): n is a, c, g, or t
  misc_feature (261)..(261): n is a, c, g, or t
  misc_feature (275)..(275): n is a, c, g, or t
  misc_feature (277)..(277): n is a, c, g, or t
  misc_feature (289)..(289): n is a, c, g, or t
  misc_feature (301)..(301): n is a, c, g, or t
  misc_feature (331)..(331): n is a, c, g, or t
  misc_feature (343)..(343): n is a, c, g, or t
  misc_feature (349)..(349): n is a, c, g, or t
  misc_feature (358)..(358): n is a, c, g, or t
  misc_feature (386)..(386): n is a, c, g, or t
  misc_feature (404)..(404): n is a, c, g, or t
  misc_feature (410)..(410): n is a, c, g, or t
  misc_feature (412)..(412): n is a, c, g, or t
ttttttttttttttttttttttttttttttttttttttttttnaactggnaancanccaaaanctcattcatananaananactntatnattttncctccanaacaattnccaaannttttntaanncatncaaaaaaattattttnaaantttttngccaaaaaancattatannactgggntccnaatnaaactcnnccaancnggtttttngtnnaactngnacttaaaaactaaacttttnagnttnngttttngcncttttccactgctntnggggctagcccnattgcctaaaancctttaattattcgcaggcgcttgcatgancccacaaacatntccaangggacatcncccactagcatccaatctccatttttgncttaatatggcggcacanaatcanana

SEQ ID NO: 747 - DNA, 556 bp, Lotus corniculatus
aaacactttgagagaattagggggaagagaaaaagtttttattttcctcttattgaaaatctggtgctaagaaaagcactttcagattcattgagaagccaaaaatggctactttgttgggaaaggtgcagaatgatttgaacttgaaggagactgaactatgcctgggtttgcccggtggtggtggtggcggcggtggctctgatcaggtggaaactccaaggtccaatgggaagagagggttctctgagacagttgatctgaagcttaaccttcaatccaaggaagatctgaatgatgatgtgaagaatgtttcaaaggagaagaccctccttaaggaccctgccaagccaccagctaaggctcaagtagttggttggccaccagtgagatcatacaggaagaacatgatggtacagaaggtgaacaatgaggatcaaggcactgagaagacaacaagcagcactgctggtggggcatttgtcaaagtttccatggatggagcaccttaccttcgcaaggtggacttgacaatgtacaaaagctacaaagagct

SEQ ID NO: 748 - DNA, 478 bp, Lotus corniculatus
gaaaaccaaaatgacaatttaataaaagaaaaagtatgatgttcttcttttcttacctttctatgacaaacaaaatgctcacaggcttacattaacttgtagagagggagactagattaccagtgcaatacaaaatttacatactaagggtagccttaatgactgtgattaaagtgaagtaagggagaaccttaaaaacctcgaccgtccacctcaaaatgatgtagacgtttacagcaaacctaatatactgtcatcaacatatcttgcatcatcataaaaagtttaggatgctccaatctcctatatagaattatacataagcaagaagggtattatatgctcagatgtgatctgtcatcttcatggatcagtgtagataaaggcatgcttcattgctctaggtgcggcttttgcacttttccatggccctaggtgctagcccaattgcttcagaactcttcattatcctcagcct

SEQ ID NO: 749 - DNA, 373 bp, Lotus corniculatus
acaagagcttcaatgtcacgttcatttagtttattatgtccaggaaattaaacagcactcgtttttttaggtataattagttgagattcctaatattagtatatgcccttaaatcaattcaagcagccactatttccacatgtcaacggggaagctggggtttgacgttgaggcattttcaggcttcatttcatggttttctatgtccctgaattcttcattgctattgttcttcaactgaaagatgtctttggttatatcttgactgagttgtgaagcaacaaacttgtcaagagctctccaatcatgagccacttgctgaaggttttgctgttgagcttgttgtatgattgatgcagcatggttgtcttct

SEQ ID NO: 750 - DNA, 481 bp, Lotus corniculatus
cactcacaaagttatgattctatttcagatagggggaaaactctagcaagtgaaccaaacattcaaatttatcacatccaaactacttggaatgaaataaacacaaagcccttcaactactcttacaagggacaacattatgggtaataaacaagatacaatactctggtcaacaattcagtttctagattatgtgactagatgaacactgatatcagtaacctgaaaagtacaacacagtaaaattaaacctatgataacaaagtattcctggtgccagatccatgaaaatgaacttgacatgctatttatcactcatcaatctctggggcgggcaagccagagggagctaagagcacgcagcctagaaaagtagtcattgatggcaaggagtgcgcgggccgatgggcgagtggtcaatattcggtgaatttgttgcagcgtctgctggcgcaaatggtcagcctgccgaataaacccc

SEQ ID NO: 751 - DNA, 515 bp, Lotus corniculatus
gcaaccacaaaccattaagcaggaaaagatacaaaaagagaggaaaatctccctcaaataagctgatttctgaaatacaattaccagctgtaacctaaatacaaacactattctacattttccccttcacctctatctatcaaacacctacacaatcaaattattgagactattttcaaagcaagggaaagcttaaataaaaatgttgcaccacaccagcatcaggtggagagaagagtaatcacattatctaatgtttacagcacagctaggcttctagaggaattcattgccaaaggacaccagcttccaattaactgatttaatgcagaagattcaatcctcatgttgaatgtgatctggcttgaaaaaacttcatgaatggagccttgataaacttcactcccgtggcctggccagccagagagaactcagggctcgcagccgggagaaataatcacttattgcgagaagggctcgagcggattgtctagttgttaatatcctaagcattt

SEQ ID NO: 752 - DNA, 344 bp, Lotus corniculatus
actaagtttcaaaagcagatgttattatatgcattttacaagaccaactttaatttcacacaggctcatacagtttctaaatacttcattttgcaacaatctaatatacaacatgcgtccaaaattaatttatttacaaactcctatggatgaaataaacgaagcagccatattcacaacttctccaaaacgcaagactgcaggaaaaatttgatgctcaaggccagagaaactacatcacatcgcgttcataatcacaagtttttgttcttgtaatcttgtgtgactaagcaggttcacggggtcgattcgaccatagtgagcttaaagccctcaggcgttgg

SEQ ID NO: 753 - DNA, 550 bp, Lotus corniculatus
accaaaaaaaggtcttagccttaggatttagttaaaaacttaaaataaagtgacacgttttggtgtaactaaaaatttgacatcactacaattaattatgacaaatattagacaaataaataaagaaaagggagacttttcttttatgttctctatccctacagccctaaaaaaaactatggacctaaatatcattaggccatgttccaagaatcatgcaactgatggattatcttcttggtcaccatgctcaaacatgccatcaattttattgtagaaatttgtcctacatatttcttatcctgtccaccgtattgtaatcacttggttgccggtgtttcctcattggacattgccctttccatgtcctcacgatactgccaacttttattgccatctgtattcttgatctcctcatatttcagtaccaaagatgtccacagagatttgcactgtccaggacttctgctgatcccatcagccaacaaattttgcgatatctcttcccagagagccatccttcccttcacaacttgaaatctgtcgcgta

SEQ ID NO: 754 - DNA, 541 bp, Lotus corniculatus
  misc_feature (87)..(87): n is a, c, g, or t
  misc_feature (102)..(102): n is a, c, g, or t
  misc_feature (479)..(479): n is a, c, g, or t
  misc_feature (522)..(522): n is a, c, g, or t
ttttttttttttttttttacagaagaaaagagaatgctataaccaaaataaaggttcaatttcttccccttctctctctcactttcntgttcttctacattntgctgctacatcagcttcctttcctccacctcaccaataaataaataaaattaaatacaagaaaatgctaaacaaaactgtccatgagctcagaaaacttccaaaaggaacttcattagtagaactatgcagagaatttcttcttctctttgacaccaacttatatatatctaattaacaccaccttggtggattataatcaaattaatgcaaaatagagacaattaggaaaccaatgaaaaattagctaggcttgtcctttgccattccaatctggtcttcctaatgtgaactccaagcttggattcttacactctaaattagatcctgacaaattgttcttgagttgggttgaatcacacttctgaatttgatgncctcctgaaattggttgtgattggaagattgttggtctaaaancttctacttcgttagaact

SEQ ID NO: 755 - DNA, 514 bp, Lotus corniculatus
agtgatttagtatgtgtaagataaggtatgtaaagaaataatccagcaattaggtctaatcatgaaaccaacaaaacatgcagagactctcaacacgggactgcttctcatggggcacagtgacaacaagaaatgaaagaataattgatatgtagaaattgaccttcctcatttttaactcggagtctcaaatcaaaactcatgtagaatagaaggcaaactaagccttcaaaatttccaatagcctctctcctttgaccctcttctatgtattattattcttctgtagccgtaaaactcctcccatgtatacttgtatctgcaaaatgcatggtgtaggagtagtatcctatacataaactggtcctggtttgtgaatgtgacttctccagctataactctcggatttagtatcatcatcatcctccatgctgtcaccctcggtcggggatgtccctcccctggaacctgcagctaaatgaaggggactttgcggcgaaccggacacagaact

SEQ ID NO: 756 - DNA, 445 bp, Lotus corniculatus
caggcacagattttcttcatcttcctctctcttctgcaaaattcatcttcttacacactctcattcctctttctccgttcgcaaatcactgtcattgtgctcaatttcctcactcaagctaaatcgtgtttaaggatattgccaaaatgaacgactcttggctcttggatgagatgcttgatgatcccaagttttttgatttccctatggaagatttggaacctaatgctatggaagaagactgggctgctcaatttaaacgccttaacgagccgtgttttgatgctttttcagtagtagcgccacttgggcattgtggcgaaacccaaaatgaaaaaccccaacttggaaagggtttccctgcttcttgtacttggatttccccaataaaacaacctcgaaagactagtggaccaacatatggaaaaaccattccgaaacagaa

SEQ ID NO: 757 - DNA, 508 bp, Lotus corniculatus
  misc_feature (444)..(444): n is a, c, g, or t
  misc_feature (453)..(453): n is a, c, g, or t
tattttttattatattgaagttatatatcgttggtcatgcattcatgtcgtggacgtgatgtggcaagtatgcatgtgtcagatggacacgtggattagggcttcaaaccgtgagaacgacagatctgttagctgcttagacagctgacttgcataacataagtgtcttaccaagtgaccatgatgggcttggtggccatgactagtgaccatgatggttagtccgtggtgtgttttatcaagtgaccttgatgggcttgatggccatgattagtgacaatgattggctaatttgtgtctaaccccgactgcggaactgagatgtagtggtccattgacaatgggtcaaccccaatcgttgagtcgtatttttcctggccgaccctttgaggttctggcattatggatatgtgaaccttcatgtgttttatcacattctaggtngtcttcttngttacttttgtaatcttgatcgtggttacaaaaatcagcaagagtctcttccttt

SEQ ID NO: 758 - DNA, 525 bp, Lotus corniculatus
aaaagttctaatcttccatctctaattggtttttaaactggccaacataacataccaataatgcataaataacccctttcaacatactatgtacctttcattacatagagcatatggcatgatctaacaagtcgtaagctctgatggtatacataaacaccaaaaacaagtaaaatctcactttaaaaacagcttctatgatcagggcaaagtacggaggaccactttttttcaacaaaagcaaccttaattggctgtattgtgctctcttggcatcaatgacaattttctaatttcttctggttgtattactcaagcatggccttggcagcatcgattaatattgctctaaactcatctgtagctcgaccgagcactgtgtacccttccttgtcctccacatccacatctgctccatgtcttataagaagaagggcgatctctttgttacggtcaattacagcactcattaaaggagttggaccagctctatctacagcatcaacctctgccccttcttcaatc

SEQ ID NO: 759 - DNA, 522 bp, Lotus corniculatus
agttaactaattacttcttccaaaactgtaaaatgaagtattaaactttttttcaaaataagctaatccaatcataaagttaaatcaaataaaaaattgaatagaaaaacaaaaaaaatcaataccttcaggtctcactcatgtcagtctatgaacaattcgttaaacagggtggtgacatgttggtcaatcaaatttgcatcaaaagggattgtcaattttattaacagaaacggagcgaccatcaggcatcagaacatgagaaaccctgtgacctatgtccagcccctgaaactggccgatagaatcacttgacaacatttccgacatatcatatggagtggataggtcaaacataggctgatgatggggagtagatacatcagatgagagtgaatgcaaatgtgacatttgcatagcctgaagttcgctccgcccatgttgtggttgatgtaaggaaaacggagcttgtgaatatgaaagatgatgcattcccaaagtaaaggagtcagcatgagttac

SEQ ID NO: 760 - DNA, 467 bp, Lotus corniculatus
agcggtgtttatgttttttacactacacttggaaaacccttcatgatatgatataacaagctttacatcaatgatgcataataccaaacaggtagaatcccctttaaaggggcaaaatttttgtttaattcctacatgaatttcatctaatatgcattacattggcacagtgtatactaatacaaattgaattcagtcacggtcagtaatatcttcaagttgttctaccactggaagacaaacaaattgaatttctgataagaaaaaaaaaaaattgatttggcttgaacccctctcagcaaaagttccacaaacgaatgtcactctcttcatacacatcattaaacaggtggtgggttgaatcaatatcatagaaagaagaagcacttagcatctgatcaacatacttagtggatggcagatcatccaggctgtaccaaggttccatcatagccattgattcaaaa

SEQ ID NO: 761 - DNA, 727 bp, Sorghum bicolor
  misc_feature (682)..(682): n is a, c, g, or t
  misc_feature (684)..(685): n is a, c, g, or t
  misc_feature (688)..(688): n is a, c, g, or t
tccccgaccagctcgacggcgcggcggtggccgataaccccgagggccacagggacggcggcgcgggggcggggctcacggccgccgccatccgcaagaaggcggccgaggtcggcgcccgcgtcgacgcgctccactgcggcgttggcgttggcctcgctggcggcggtgctgcctctccgcagccgctgtcgtcccaccatcgccgccgccccaagaaccccgacctcaaccgggagcccaccccggacacctcagacgacgagtgatttcgtcgtcgttcttcttctccctcatccatctactactctcctagtccttaggcaaaactactcacctaaggggtagctagctagctagctagacagcagtagcaagtaaagcaggcaaccagatggcgccagggacgcagcgcaaggtgttcggtggaatgcggatgagctcggaggtggccaataatggagccgcgacgtcgacgtcagggccggaaaccgtagtaagttgtaggaggagcctagcgtgctagccgtgccgtttgcccggagtcgacgtcgacggacggcgacggcgctgtcaaaggctctagcaccccagtagcaggagacagacgggtgcgtgcgtgcgtgtcagtgtatgcgggcatgtagctaagcaagacggctatgtccctctccccttcccntnnggntcgagtgaaagaaaaaaaaaaagatactcccggcaagca

SEQ ID NO: 762 - DNA, 682 bp, Sorghum bicolor
gcatgagttagaaaacattttcttctttcctcttcacttttttcattttatctagatcctggcctgttcccccatggcggtggcacccaccaggctgcagtctccatccccatggtggcggcgcctccaggtgtggcgcatcaccatgagcacaaagatgtcaccatggcctcgtcaacggcgaagggcgttgttagtccttccgaaggttcatctcatacttggagagggcagatttgttctcatttttctaagacaatagctctttcagtactagagcaattgctagtggagtggttgctggcgcagccttgctatttgctactcccactaccggcagcggcggcagtggtgatgagacgggctcccagcccctctttgcctggttgcgcagcttgtgcgccttcttgtggctgcgcgagcgccttcgagctgcagaacttcctggggcagtagtagcaggcgaagaccgcatggaacctgggcagcgaccacggcaacccgttaactgatctttggctagttttgtgggattcgatagatttgttgatacgtatatctatcagattttgtattgatatattggtcaaaaaccgatatattttgacagcggaaatctgtaatcagatgtctagacagaccctaatattaaccatgaatattattttttaatgttttcttt

SEQ ID NO: 763 - DNA, 888 bp, Sorghum bicolor
aagcctcctcctttacatttgcaagccagccggcctcctcgtcctggctcgcaagcaaagcaaagcaaacgaagcagaagcagggaagaagaagaaggcgagagccgagaggtgaggagctaggccagtggcgcctgcagcagcaatggcgacgacggacctggggttcgaggagacggagctccgtctgggcctgcccggcggcgggggagaggtggtcggcgaagggaggagctctgtcgtctcctccgggaagaggggcttcgcagagaccatcgacctcaagctgaagctggagccggcgactcccgcggccgtattgaaggcggcggaggcggacgagcatcaggacggtgttgccgccgccaaggaagacgccggctgcgtggccgccgcggaggaggccgccgtcggcgggaagatgaagaggtccccgagccagagcagcgtcgtcaccgccgccgccgtgcaggctgaccccgccgagaaaccgcgcgcccccaaggctcaggtggtgggatggccaccggtccggtcgttccggaagaacatcatgtccgtgcagtccgacaagggcgccggcggcagcaaagacgccgacaagtcctcgccggcggcggcagctggcggtggtgcggcgttcgtgaaggtgagcttggacggcgcgccgtacctgcgcaaggtggacctcaagatgtacaagagctaccaggagctgtccaaggcgctcgagaagatgttcagctccttcaccattggaagctgtaggtctcaagggatgaacggcatgaacgagagcaagctggtggatctgctcaacggctccgagtacgtgccgacctacgaggacaaggacggcgactggatgctcgtcggcgacgtgccgtg

SEQ ID NO: 764 - DNA, 813 bp, Sorghum bicolor
cttcctccccaccggcggtccggcctccctcgctcgcccgcacgaagaagaggaagccgccgagcgcggagcccagcacgccgccgccggccatgtcggtggagacggagcggagctccaccgagtcctccgcggcctccgggctcgacttcgaggacaccgcgctcacgctcaccctccgcctcccgggctccgcccccgcccccgctgccgtcgcggcctcctcgtcctcgtcctcgtcctccgccttccccgacgccgaccgcaagcgcgcctcctccgacgccaaccccgaccgctcctccccgctcgccgcttcctccgacgctgcaccggcacccaaggcgcgggtggtggggtggccgccggtgaggtcgtaccgcaagaacgcgctcgccgacgtcgcgggatccagcaaggcaaaccaggccgccaagttcgtcaaggtggccgtcgacggcgcgccctacctgcggaaagtggacctccaggcgtacgccggctacgaccagctcctccgcgcgctccaggacaagttcttctcccacttcaccatcaggaagttcgccgacgacgagaggaagctggtggacgcggtgaacgggacggagtacgtgcccacgtacgaggacaaggatggcgactggatgctcgtcggcgacgtcccctggaagatgtttgtggaaacctgccagcgccttcgtctgatgaaaggttcagaggccgttaacttagcaccaagagccgcccgatgaggcgcactccacctgttggtacgcactggcttcttgaaggaaagaggaaactttgctg

SEQ ID NO: 765 - DNA, 652 bp, Sorghum bicolor
acatgctgcagatggccaccgcggtggacaggctcaaagagctcgtcggcttcgtcacccaggcggaccatctccggctgacgacgctgcagcagatgcacaagatcctgacgacgcggcaggcggccaggggcctcctggcgctgggcgactacttccagcgcctccgcacgctgagctcgctgtgggcggcgcgcccgcgggaggcggcgattagctagatgcctgcggtggccgccagccaaaagctcactggtgaggtgaccgcaccaaagaacacgacgacgacgacgaagagtagtagcagttcgctgtatactttcccaagtggagaacgaagaaatcgacctcgctgggtttggatgaagaatgcaaggcttctcactcaatcagcggcggtggccgcgtttctcagcaacagcaagtcagcaagtggtgtgcgtttgtcaggcgattagagaataaacggaaatcgattgaggtctttttatttggcgggcggaaagacgtgtacatatcttgttttggtacccggccggggcctcctagaggcgtatgattgatgatgatgctggccttttataactactagagttgagggtatatatatacttatcatatatgtaattacctgtaactagtgttggtcaaa

SEQ ID NO: 766 - DNA, 630 bp, Sorghum bicolor
tcatgggtcaaatggcccttgcccttggcaagctgtccaaccttgaaggttttgtgatacaggctgataacttgaggcagcagactcttcatcagatgcaccggattctgacagttcggcaggcagctcgatgtttcttggccattggcgagtaccacaaccgcctccgtgccttaagctccctctgggtttctcggcctcgagagatactgggtgcagatgaaggcaattgtggggagataagcattgcggcacaagcatctcaaagccaattttcatccttctgattcacgcatgatttggaactaaccttcgtcttaggagcaagagagaaacgactgggaagttgaaagagaagttttggatgccatcagatgtctgagaggcacagagagctggaaaatgaatgaagctttagaacagggagtgtttctgaaaatgtgcggaacctgtaggagcaatttccaggacgtgaaattgtttagttcactggactcgtgtccagtactgcacgttcttttggttctgtccagtctagattctcaaacagctctgcctttggttctgtccagtcagaattctcaaaacagctctgcctaggtaacgaaagaattcattctgcaactctac

SEQ ID NO: 767 - DNA, 825 bp, Sorghum bicolor
tacccgtcttcgctgatttctgccgctccaattccatctctttcctgcttagaacttcttcctctgcttctccccttcatagcttttggtgccttgtcatcggcgacctaaccgccggcggccggataaactaagctagccccttggctccaaaagtcgtctcccgtagagagcacttgctcacctgctcctcacgcccctctgctggaactggacttgcgcggtgtggagatccatccggacctggttcgatttcttcatttcgggaaggtgtcgccaccatgattctcagttaaccacagctaaatgccttttcttaatctttccgggtcgggaacatgcagttaaatctgaccagtagctgttgttggtaaaggttgcttctgtgtccagcgggtggatcactggactgtgggttgtgttaactgcaggctggcttatcagcctacccataaggaaagcgaaaaagagacagcaaagcaatttgttgtctcattcttaggagctggcgagtactcggcatggcagatgctagttcgaggactgacacctcgactgttgtagacatggatgataagaatcaaaggttagagaatggacagggtggagctatggtcctgccttctaattcatctgatcgatctgacagatctgacaaacctatggaccaaaaggttttgcgacggcttgctcaaaatcgtgaggcagcacgaaaaagtcggctgagaaaaaaggcatatgtgcaacagctagagagcagtaagctaaaacttgcaagcctggagcaagaactccagaaagctcgacaacagggaatcttcatat

SEQ ID NO: 768 - DNA, 833 bp, Sorghum bicolor
ccacccgcaccgcaagccaggcacgcggcttctggaagcttccctctcatctggttggttggtcacccacgacccaaatcgcccgcccgcggctcctccgccgccagccaggcaggtgtcgtctctgccctcggtacgaccgccggattcgggcgctggggtgggttgtttttggtctcccccaccggccacacacccacaccagcctcggccccgccgtctctccaagaccttggtcgactcctccgcccgggcatgcccccccaccgccgatcgcacacggtcgtatgattgcaatgaatcctgagatcgtactaccgtcttggaaacaattttcggcatcggtcaatcctgtgaaacactagaccgctcatcaccttgcaactggaaaggagagagcaaagtgatttgctgtctcctggtgatcgatgctcttgaggcctagtgatggctgatgctagctcaaggactgacacatcaatcgttttagacgacatcgacaagaatcagaggatggagaatggaagtggtgcggttctaccttctaattcttcagataggtccgacaggtctgacaaacctctggaccaaaagacaatgcgacggcttgcccaaaatcgtgaggcagcaagaagaagtcggctgaggaaaaaggcatatgtgcagcagctggagagcagtaagctgaaacttgcacaactggagcaggaactccagaaagctcgccagcagggaatcttcatttccagctctggagaccaaacccatgccatgagtggaaatggagcattgacttttgacatagaatatgctagatggctagaggaccaaaa

SEQ ID NO: 769 - DNA, 689 bp, Sorghum bicolor
ctgggtgccgcacactggctgaagcaaagatacacatagaacaaaagaggaaaaaagaatacgagctgaatgcccaaaaagctaaggagagcagccttattgcaaataataaatcggtacagaagatgaatcgatctatgaaaattgagtctgatgggaatttggatccaaagaaaggtggtgctggcttggattctcctaaaactacaggacttacaagtgttaagcagtgggatgactgggatatagttggtcttcctggggcagagctattaagtgctagcgaaaagcttctatgttgtcagaacagattgctacctagtcattaccttagaatgcaggaggtgttgatgcaggagatattcaagggtagtgtcttaaagaaggaagatgcccatgtcttatttaaggttgatcctaccaaagtagatagtgtttatgatatggtaacgaaaaagctgggcaaccatgaggaggctccaactgtctagcttatgcttttgagcttgcctgctgtgacatgccgaagaaaacaaatcttggtttcgccccctttgcagcgcatctgaaccatagctgaaggtggaactgtactaaatcgaattggccatagtttacagaaattcatatcagttgtcagaagcacaataaggcattccagccaagttgtaaaattattacccgcccga

SEQ ID NO: 770 - DNA, 627 bp, Sorghum bicolor
cgaccggtgggggaaggtgctcgaccgcgtgcactgcgtggacgtgctcaaggcgatcaagagcttcgcgggggcggcccgcgcgatccacgcgctccagggcgacgagctgcgggtggcgcggcgcgtgaggcagtactcccgggagctggaccgcaagtccaggatgctgcggcaggtggagaagagctactacgactcgtacctgcccggggtcatgtcgatgtggcactgggggaggccggcgtggagggaccacatgcaggcgcgcgacgcgggcgacgaggtggcgcagcgcagggacgagatcgcggcttgccggaagatggtggaggacgagatgcggaggcatgccaaggccatcgacgccacgaggacggccacggtcaccggcgtgcaggggaagctgcctgccgtgttccaggccatggccgcgttctcggcgtcgcttgcgaattcgctggaggccgcgtgcagagctccacagcagaacaccaacatgcagtagtagctactgtccggtcattcttttttgcgtttgcatttttggttttcatcgtgttttcagcatctatcatacaaaaatatacagaatacaaagagagaccatagaaatacgaataagac

SEQ ID NO: 771 - DNA, 728 bp, Sorghum bicolor
tggaagccactgcccaatcgccggctgacactcacaagatacctgcctccctctggatcgctatctcttttctagtgctcagggaaagctagctcagagctgttgagagaaggaagcaaggagacggagagggagggagggaggaaaaaaaaacacacacacacacacacacacacacacagaggtgttgagcaagaaccgaggcggatcgccttttgttcctcctgccgaggactagcctgcctgtcggcgccgcgagagatcaagaggaggcgcggttcagtgattcctacaggggagggagaagaggaggaacaccgggggcggagagagatgatgcgggagatgtatatggacgtgctgccgccggtggaccacataaccgcacggagcaactggttcccggccgcggcgcgtctctggacggcggaggagaacaagcggttcgagtctgcgctcgccgggctcgacctctgccacccggactgggagaaggtggcgcaggccatccccggccggacggtccgcgaggtcgtcagccacttcaagaacctccagctcgacgtccagcagatcgagagcggccaggtgcccttgccggtctacggcagcggggccagctcgttcactctgcagtgggacggcaatggcggctacgggcccggggacttcaggcacgggtaccgcttcggcggaggctgcgggaagcggcaccatggccgcacgcc

SEQ ID NO: 772 - DNA, 685 bp, Sorghum bicolor
cctactggctcgctcgctgcgcttcgctttcccctcaatccaccgcggactcgagctttgctcggaggagacgagacgacccaagacttgctcagctcccccctttgcttcctgcgcaatccctgcggcagcgccttttctttcattcaatggacagcgactacgttgccagcctgctcatgggctcatccgcccatgcgctcgacttcgccgcgctggacaccgggttcctcgacacgctctgcggcggcgccggcctctttggggtgcccggggtcgccgcggggactgggtgtggcagcggcggcggcggcgggtccccggaggggtcctcggtgtccgacccggcgtgggcgcgcgccagcgacggcggcaatgccaggaagcgcaaggcgccgcccacggggtccgccggcgggaaggagacctgcttgggcaaggctgcggaggccaaggttccggacgggaagaggtgcagagtgggcgctagcgacagtccggtgaagcccaaggtagaggaggcggcggcgagcgacgcctcggttgaagtcaaagggcagaagaagggcaaggggaagagcccgaagccggcagtcgaaccacccaaagactacgtccatgtccgggcacggcgaggtcaggcaactgacagccacagccttgcagagagggttagaagagagaa

SEQ ID NO: 773 - DNA, 842 bp, Saccharum officinarum
  misc_feature (104)..(142): n is a, c, g, or t
tacattactgctcattcccacccctttacgcctccactctgtgaggaggtgcacactctcgaacatcatattcatactcgaagtttgtatgccgatcctttgcnnnnnnnnnnnnnnnnnnnnnnnnnnnnnnnnnnnnnnncgacctcaagctgaagctggagccggcgacccccgcggccgtcgtgaaggctgagggggaagagcaggacgacggtgctgcccttgccgccgccaaggaaggcgtggccgccgccgcggtttggccggcgggaagatgaagcggtccccgagccagagcagcgtcgtcaccgccgccgccgttcaggctgaccccgccgagaagccgcgcgcccccaaagctcaggtggtgggatggccaccggtccggtcgttccggaagaacatcatgtcggtgcagtccgacaagggcgccggcggcagcaaagacgccgacaagtcctcgccggcggcggcggcggcagcagcagttggcggtgccgcgttcgggaagggtgagcttgggacggcggcgccataaccttgcgcaagggtggaccctcaagaatgttaccaagagcttacctggaagctgttcccaaggcggctcgaagaaagaatgtttcagcctccctttcacccatttgggaaagctgggggggttctccacggggatggaaacgggtcatggaaacgcaagagccaaagcctgggtggggaattctggcttcaaacggggcttcccgaagttaccgttgccccgaaccttaccgaaggaaccaagggacccgggtcgaactggggaattgcctccagtccgggccgaacagatgccccgggtg

SEQ ID NO: 774 - DNA, 979 bp, Saccharum officinarum
  misc_feature (440)..(440): n is a, c, g, or t
  misc_feature (498)..(498): n is a, c, g, or t
  misc_feature (510)..(510): n is a, c, g, or t
  misc_feature (520)..(520): n is a, c, g, or t
  misc_feature (556)..(556): n is a, c, g, or t
  misc_feature (561)..(561): n is a, c, g, or t
  misc_feature (613)..(613): n is a, c, g, or t
ccaataacccatgatggtctacaatatgaactgagcgttcacttgaacacatacatgtcatcccttcataagatcttagattcaaatatctcactaacacatgagcaatgtgaagaaactaatggacatactagagacagtacaaaaaattatcctatttatgaattaattgaatttattcccttggacgggcaagccaaagagaactcaaagcacgcagccgagagaagtagtcgcttattgcaagtagagctcgtgctgattgtcgggtggttaagatgcgttgcatttgctgaagtgtttgcagccgtaaattatcagcctgtcgtagaaagttctcaagggtgccaagttttcccatagccatcgccatttgtcccatgtaatttgcaacattgccagaaggtccagcagggcccagggatccagatgctagagtntctgcaagcgactgttgtagtgcttccatcccttgagaaagagcatcttcagcttgtngggaggactgtngcaggtgggnatatacaacaagctgctgatcagtaagaggctctangtganctgccagcaacttaagaagctcagatgatcggaagccacctaaccacatganacatctctcagcaggggtcttccacatcccagacagcacatgaaaaacatctgctttagctggcacacccttgagcctgaaaattcgtcgtagtgtgccatatgctatcaacaataccacgaggatcattatcgccggcatgtgcattgactgcagccctcaaccatttacatgttggtgtgctcctccaaacagcgtgatattcatggtcaattgccaaacttcatttccactgggtgatggagcttgacttctgatgtccaaataaaattaacttgttgacagacccgctgaactctggctccacctgagtaatttcaaccggcaacccccaggtttggagggtgcccccaaccttaaaaggta

SEQ ID NO: 775 - DNA, 742 bp, Saccharum officinarum
  misc_feature (545)..(545): n is a, c, g, or t
  misc_feature (599)..(599): n is a, c, g, or t
  misc_feature (615)..(615): n is a, c, g, or t
gcacgagagtgaatgctcatgcaagtgacagtgatctacgacttattgtagatggcataatggcacattatgatgaaatattcaaggtcaaaggtgttgctgcaaaggctgatgtatttcatatactttcaggcatgtggaagacacctgctgaaaggtgcttcctgtggcttgggggttttcgtccatctgagcttttaaagctcctagcgaatcacctcgagcccctaactgagcagcaaatgctgggtttgaacaacctccagcaatcttcccagcaagcagaggatgcgttgtcacagggcatggaagcactgcagcaatctttggcagagactttagctggatctcttggtccatcaggttcttcaggaaatgtggcgaactacatgggtcagatggccatggccatgggcaaacttgggacactcgagaattttcttcgccaagccgacaacctgcgacagcagacattgcatcaaatgcaacgcattctaacgatccgacaggcttctcgtgctcttcttgccatccatgactacttnttcgcggtgcgtgctttaagttctctgtggcttgctaggccgcgcgaataactntggatcatcgctgttntgagttccctgtgcctgcctgttggaattctatggcacgctggatgcctggatcgcagcgacaccatgaagatcattcatggtcctgtgttttgtgtacaattacttttggctgctgcttggcgaaa

SEQ ID NO: 776 - DNA, 676 bp, Saccharum officinarum
acaaaataagcagataaatgagctgaggactgcagtaaatgctcatgcaagtgatagtgacctccgtcttatcgtcgatgggataatggcacattatgatgagatattcaggcagaagggcattgctgcaaaggctgatgtgttccatatactttcaggcatgtggaaaacacctgctgaaaggtgcttcttgtggcttgggggtttccgttcgtctgagcttctaaagctccttgtgaatcagcttgagcctctaactgagcaacaattgatggggctatccaatctccagcaatcctcccaacaggctgaggatgcattgtcacaaggaatggaagcattgcagcaatcattggcagaaacgctggctgggtcccttggtccatcaggatcttctggaaacgtggcaaactatatgggtcaaatggctatggccatgggaaaacttggcacactcgagaatttccttcgtcaggctgacaatctacgacaacagaccttgcatcagatgcaacgtatcctgacaatccgacaagccgttcgtgcgcttcttgcaatccatgactacttttcacgtttgcgcgccctgagttctctttggcttgctaggccacgagagtaacatcacccacgttggggtcactccatgaactgatgatctgtgaatgtgggactg

SEQ ID NO: 777 - DNA, 764 bp, Saccharum officinarum
  misc_feature (589)..(589): n is a, c, g, or t
  misc_feature (624)..(624): n is a, c, g, or t
  misc_feature (642)..(642): n is a, c, g, or t
  misc_feature (700)..(700): n is a, c, g, or t
  misc_feature (734)..(734): n is a, c, g, or t
cacgctcttaaactatcaaaagaggatgtccttctttattcagctaaggttattcctggaaatgagacacgggtaatgaagatgatgaatcgcctcactgatcttggcccaaaaattatcatgggtaaagattctggcctgcatacctctgggcatgcctaccgagaggagctggaggaagttcttcggattgttaaaccacaacatttcttgcctgttcatggagaactcctatttctcaaagaacatgaattacttggaagatcaactggcatcaggcacacaactgtaataaaaaacggagagatgcttggtgtgtcacatctaagaaacagaagagttttgtccaatggatttgtttcattagggaaggaggatcttcagctcatgtatagtgatggggataaggcttttggtacatccactgatctctgcattgatgagagactaagaattgcatctgatggcattatttttgtcagcatggagatcttccgacctcagaaggaacatggtttagcgcagtcaggtttgaaaggaaaatttaagattactacaagatgtctatggcttgataatggaagaatgntggacgcactctacaaagcagctcatgctgcattngtcagctgtcctgtgaantgccacttagtcacatggagaggatggtagctgaaatcttgaggaaaatggtacgaangtatagtgggaagaggcctgacgtcattgcggtngctacagagaacgccacggaggtttcccag

SEQ ID NO: 778 - DNA, 818 bp, Saccharum officinarum
  misc_feature (805)..(805): n is a, c, g, or t
gagaaaaaattataatgatttcatttgatcaatcagatgaacagttcgcctacaactacaaagtacaggggattgtacaatttcatgttgttttcctgtggcagtatttcgcatgtcgatcaccccggcgtgatgatctctggtccacgccatgtcaagccgcgcggactctgtttgttcctcttcctcgtgccgagctgcagatcctcatgtcgtctggttctgttatcgctgtttcgctctaacagtgaacagaggtggcggccagcgaattgccgcgtgcgtgcaagacaatctcagcaagaatctcgtgtgatgccaatcgacccgatgcgtctgtcaatccttggtgggcgacagctcgaggatgcggccggacagcgcggtgacgagcgccgccttgaagctggggtcccgcgtcagcgtcatcgccatctgctccgccaggttccgccggatcatctccgacgccgccgcgcccacgggctgctcgccgttcatcgcgacagcgtcctgctgctgctggtggtggtggagctgcatctgctggcggtgcggtcccggggcgaccgcagcgggccggctttgtggggacggcggatttcggacctgtgtttttttgtttgggggccgtggcctcctgatccgtctttgtgcattcttgcgcctgttggttatgattcctggtggggcttggccgattataattctacacattttatatggctaactatggttgagagtttctaaagtcatcgtttgatacttatttatgatttggggggtcatggactaatagataacnatgatgtatctca

SEQ ID NO: 779 - DNA, 827 bp, Saccharum officinarum
  misc_feature (522)..(522): n is a, c, g, or t
accgtgtagcatcccgggtcgaccacgcgtccgatcgtattccctcctcttactagtctcttctcatcccaggtcacccagagagagctagcgaggtggtgagtgagaccagagcagcgctagcagccagctgattgcgccgcgcactagctagctctcggccggatcgctgctgggcgtctattaagccgccgacgccgtcgtccgccctcggcatgcgcggttctgctcgcccgggagatggcacctgcagcttcgatccactcggccaccgccgccgctgctggtgcttccaagcgccaggccgattccgacgctgagctcccgctcgactcctccgcgctccaccagcagggcgacgaggccgcgcgcaagggccagctccagcagccgaggcaacagcagcagctggagtgcccgcgctgtcgctccaccaacaccaagttctgctactacaacaactacagcacggcgcagccgcggcacttctgccgcgcgtggcgccgctactggacgcacggnggcacgctgcgcgacgttcccgtgggcggcgcctcgcgtcgctccggcgggggcgggaagcggcgacaggtcctcgcccaacccctcctccgcggggtccgcgtccgcggcccggcgcaatgccgggaggttcattccgggcgccttcctgccggaacctcgttcgccttcccgttcttaacgaagggagttcttcccccctgtgaattcggaggggtgttgccttgcacccgggggcctttcccccttcctggaatcgggggtccccgattttccaaaagggctcccccgggggaaacggaagg

SEQ ID NO: 780 - DNA, 984 bp, Saccharum officinarum
  misc_feature (436)..(437): n is a, c, g, or t
  misc_feature (658)..(658): n is a, c, g, or t
  misc_feature (739)..(739): n is a, c, g, or t
  misc_feature (806)..(807): n is a, c, g, or t
  misc_feature (824)..(824): n is a, c, g, or t
  misc_feature (829)..(829): n is a, c, g, or t
  misc_feature (934)..(934): n is a, c, g, or t
  misc_feature (941)..(941): n is a, c, g, or t
gtggcaccctcacccactgctggctccaatactgccaaggcacgcatgagatggactcctgagcttcacgagcgctttgtggacgctgtcaatcaacttggtggcagtgaaaaagcaactcctaagggtgtcctgaagctaatgaaggcagacaatttgaccatttatcatgtaaaaagtcatcttcagaaatacagaacagctcgatacagaccagagttatctgaaggctcttctgaaaagaaagtgacatctaaagaagatataccatctattgacttgaaagggagttttgatctcactgaagcacttcggctccagttggaacttcaaaagcggcttcatgaacagcttgagatacaaagaagtttgcagttaagaattgaggaacaagggaagtgtcttcagatgatgctagagcagcagtgcataccgnngacagaaaaggtgcagaatgctaaaaccacttccgattctgagattcctgaatcttctacagtcaaggatgtcccagaaaacagtcaaaatggaccaaccaagcaaacagaatcagctgacagccaatgaagttgcaagcatgaaatgggtttcatgatctgattggttgttttcaggcttagttgtttttgtccattcgtgggaacagatgaatgctatngttaacttctctgcaaagcctggccaggtgcatgtaactaggagttaatgtatagtacccaccattacggtatcactgaantcccgtggtatgtggatgtagtcttcagaagacagcgcaagcacaatgtcaggggtttgaactggtnntttctcttcttcctttngtagnatcaagaacatctggtaagcatttgatatggcttaatcaagattacaatatgttaacacttgttagacatgtttgtaccaatttgagaaagatgtgtgcttttanaaaaaanaccactttaaaacccaatataatttaacaccctctcccaaaac

SEQ ID NO: 781 - DNA, 587 bp, Saccharum officinarum
gatttgaaacatatatataataattatggttaatatgaagtctactacattatcagtaaatataagaggaagcactgcatgaatatggtacgatacaaagcagtgtgcatagtgatggacaatctgttcggtacaaagcacgcacacacataatagcttatactgatatgtctattcaatccataaagttctaataggtgttatgacagaaaatagcaggcgcaatattttacaatggtcagtccaggaacctttggtgctcagcagaagctactaactcttgaggcattacttgtctagcactgcaaaagatgcctaacatggcagcacagcctattttgtggccttggttgaggcagactttcgggtgttgatttttggttggaggctggagccatctgttttgcgcctgattagtgcttttagtcttctgctctgatggcaagcgaggtgaggcgctcttgtcgtcatcagggaggtcatcagagccaaaatcttcatcagtgataagatcctggtagatgcaatcattttttggtgcggtatcagttgcagaggcttgtggaggtgtttgcgaagagcccgca

SEQ ID NO: 782 - DNA, 1002 bp, Saccharum officinarum
  misc_feature (13)..(13): n is a, c, g, or t
  misc_feature (522)..(522): n is a, c, g, or t
  misc_feature (566)..(566): n is a, c, g, or t
  misc_feature (636)..(636): n is a, c, g, or t
cggacgacctttntttttttttttagcttgccaacacaaaatgtacagggctcaacaaattgctgagaatacattgtatgttcaaaggagaggattcatgaagcagtcaacatggctaaaaacaacaaagtaccatcagagaatttcactccaaaatccaaatgccctgataataccgaacccagaaacaggaaatgagcccaaaacaaacagacttgaagggttcctggatcattctactacatggattgatcagccagtgcgataacgaacaatttcaactaattgaatgaatcaaataacaaataagcttacagagcaggaagcagcacaaggatgtcaggctattatgaacaatggggacctactggaacggcagattctcattggtaggtctcgttagaaggtgctgctgctttcactagcagagatcgagctgctctctgacttcacaaccagtggccccttcccaatgtccaaaccctgcagccggccaagagactcttgctgcattatgtctgngagagtgtttgggtgggacagcatctggtggtttggcacattgngatggggtgggtggaacggtggaggcaactgggtgctaccaaggtgtggagatgcattttgctgggaatngcggaagaaggtagagttgattgaacatggtaaaatctatgtatatgtctcgctgaatgggcatctaccagagcatgctaaacctttcacgtctgcttagtgcatattaaggatacgggttgagctgtgctcatgctgaactttttaagttgattttgaaaagcagcggccttttatatgggtgacggaagccgtttcacaaagttgccttcgtagttgaaaacagcctctcttagaaacgtatgctgtacaaattttgccgtcgggatggcgaatcgcaaattatgataagactttgctattcttgtcagacccagattttcggcccgactttcggagaaaaaggactaccgtaataattattta

SEQ ID NO: 783 - DNA, 918 bp, Solanum tuberosum
gatcaaaaactcataatgtatcaattacccatttctacagagttacctccgacttttttcccggcagaattcccggtgtattgccggagttcaagtttcagtagtctcatgccatgtttaaccgaatcatggggtgacttgccgttaaaagttaacgattccgaagatatggtaatttatgggcttctacaagacgccttcagtatcggatggacgccgtcaaatttaacgtcagtggaagtgaaacccgagccgagggaggagattgagccagctatgagtacttctgtttctccgccgacagagactgcggcggctccatcggctctgcaacctaaaggaaggcattacaggggcgttagacaaaggccatggggaaaatttgcagcggaaataagagatccagctaaaaacggcgcacgggtttggcttggaacttacgagtcggccgaggaagctgcgctcgcttatgatatagcagcttttaggatgcgcggtactaaggctctattgaatttcccgcatagaatcggtttaaatgagccggagccggttagagtgacggttaagagacgattacctgaaccggctagttcattggtatcatcagcctcggaaagtggctcgctgaagaggaggagaaaaggtgtagcggctaagcaagccgaattagaagttcagagccggggaccaaatgttattcaagttggttgccaaatggaacaatttccagttggcgagcagctattggttagttaaaatatggagctaagaactcaacggcaagggcttgtttcgctttgaagtggacagaaaattgcaattcattccacttggtgagaagtggaccaaagaggccatttggattatgtgtatctaacgtgtaaagtgcactttttagtttgtgcttttatgaaa

SEQ ID NO: 784 - DNA, 980 bp, Solanum tuberosum
aagtttcaatcgatacgtaaaattaatatttctttcaaataattatcaaagataaaataatattaatgaaaatatattaatgaaaatcaaactttttacaacttcggattaaccctatgacgataatttttttcattggacttttgattcttctccactatcatagtccgatgcatagagtatttcgaatttattaagggttcgggaaaaatatgcacaaagtatttcgcgttcggaaaagtgccggctatttaactgaccaatagttgatggacacctgtcaattgttcgatttgacatccaatttgtatagcacttgatctactctccactcctccgtcacatttccgaacggcttttcttctccgtttcattgaaccgttttccgacgagcttaccggttcaggcgatgctcgtcttttcgccgtaactcgaaccggttccggttcattcaaaccgatccggtgcgggaaattcaaatgtgcttttgatcctctcattctataagcagctttatcataagcaatagcagcttcttcagctgtttcatacgttccaagccaaaccctagctccgttcttcgccggatctcgaatctccgctgcaaatttcccccacggccgctgtctaacgcctctataatgtcttcccttcggtgtttcagccgccggagctgccgtagtctccaccggagaaggtacaaattcaggcgctgactcaatttcttctctcggttccgattttacttcgccggcggtgaaactaaacggcgaccatccgacgctaagagcgtcctttaatagaccgtaaattaccatatcttcggaatcgtcgacttttagtggtaaatctccccatggttcagttaaacaggggattagacgactgaagcttgaattccggcgatacaccggaaaatctaccgggaaagtcatcggtagtaactgttgatccattttgcttttgatttttgttttttt

SEQ ID NO: 785 - DNA, 854 bp, Solanum tuberosum
tatgacaactggcttttccattattgaattccctctaaatttcccttagctcacataatacgccatctcccatcattagaacagccaaatttgattccaaaaacaaagaggaaatccaagagagataaaaaagaagaagaggatatttacacctacatctctagctatatagcctataggtgaaaatttgtgaggattttggggagcttttaacatggcggatggccaaccaccaccatatcttatgaggtccgagcagctaagcttttgttgaataaacaaaagggccaattgaaaaaattatactatccagcaggttactggtattactattattattattgattgtgtcggtgctttcaacatattttcttttcatttttcattttttttgaggagtcttttattatagagttaataatttaaaaaaatgcttttaagaaaatcaacgtagagtagccacaaccgctaccacaataaccttttcttcattcactaccagcttttgccttttcatgggtattctttctctctctgttattcctcccagtttattagctctagattacagggaaacaaaaattttgtaatttagtccctgtaatttcgcataattattatacagtaagagaaagatggagataggtggtgggggtcaaagtggagttgctgcaagttcaggggtttgttgtggtgggaagagaaagaacgaaaggccgtacaaagggattcgtatgaggaagtggggaaaatgggttgcagaaattagagaacccaacaagcgttcgaggatctggttgggttcgtattcaacgccggtggcggcggcgcgggcttatgatacggcggtgtat

SEQ ID NO: 786 - DNA, 868 bp, Solanum tuberosum
gataatgttgaaccatcgatttagatttcgagcaccaagttatgaaattttactgttctccattccaattgatcctggagttccacttcatatgtggaagtggaaatttgagaagacatcaacacacctccaaagaatgaagaaggtatcatcgactgtgaaaagtcctacattgccgtgtcagatgaaggaacatggaatgtcccttgataacccaggtaaagattttacaataatcttattacacttatgtgaatactctgacatttgttaactcaattagacgttattggttcatgcatgagtatttttgaaaatagagtaatgcacctattgtttcaattgctctctggtgatttctgaaaacagagtactttctcccaaatttctttatttaattctttataggatcttcactgggtacctttcaaccaccagatggaatcacatcagcaatttttctttcgcagatcgacaatgaaaccattgtaagattagcttaagttaatgaatgaatagtttcctctgcttcaatctaaatggtttctggtacgatgaatttttcggtacttgcctttgcatgtggattgtttgatgatattgaaggaaagaacatggcatttgattttgggttaatgcttttttgggcagattgtagcgacagcagaaacaaaaaactatgagaaattgtcttataatctttgaaatgcttcctttctaagattatggaaagacgtttgagaaatttaggactgatattgctattatttcagctactggtttctttaatctagcttctgcacaggtgagttctacaatactctttaattggttagcttgtgatttttgaaagttttcactgatgaaa

SEQ ID NO: 787 - DNA, 639 bp, Solanum tuberosum
atcactgagagttgaaatccaaaaatgttctgtaatccaatgtctaagtaacaatatacagttctatttacacatactatggtgcagtgtagtacaatgtgagaactaaaaagtgaaatttcctctcctaccagtgtaagcataaatctgaatctgcttctcggaagggccaagtgttgtacaaataactcagggtgcgacataaaagagccaaactcaaagctggcacttccaaactgctagccatgccatctgccaatttcgtacttagcagctgcatttttaggtcagaccaactattggaaccttgggaagttgtttcaacaatttgataagctcatacgtccttatatctcgaccagaatggaggcaaatgtcaagtggggttagaccatccctgttctttagagtcttgtcagctcccttgattaacaaaagcctcactatatcggttctacgggattgaacagccagatgcaaaggtgtccatccatcatgatcttggaggtttatatcaacattatacaagagaaggatttttatcatgtgagtggatgccgttcgaacagcatagtgcatcaacgtggcaccatctttgtcacgtataagtggatttgcagattctcttaaaagaaagtt

SEQ ID NO: 788 - DNA, 944 bp, Solanum tuberosum
ggaggattcagcaacaaccatgaagctgcttcatcttcatcttcttcatctgcagtcatatcatctgcattttgagtaaaactcaagaacccataatcctccgtgctttcccttgtgggcccaccaatcatcatagaaccactgccaacggtttcgacagctggaggaccataaagggttcctggaaagtggaatcaagacgaatttagaatttaagtttgatgggttcaatctttaaatgttcttgctacttaatgctatacattttggaattatggttcaaaaatcatatttattgaaatatttgttattttttacatgtaggagtagaatttttgtgtggctacctaaaatggtcataattgggacacggtggtgacggcgcgccaaggggttggcagagtggatgtcagcgtcgcaggaggcacagagtgaggcagcatctgccttgcaaagaaaggctgcaggggcacgtccgcaggcctcgcaaacccacacacggtcgtgacgagaagccaacagatttgctgcatgcatgcggatgtcacaaccggcacacaagaaggtggaatcttccctgcagtaaacgtattttgcttacatggtgcttatgaactaccatttttaggaaaaagtattgcatcagtgctttcctatcctttgagaagtggaccttttattctttatcttcagtgatgggtcatttattgtgctgaaagagaatctgggacaaacactagatgagagagaggccctggaccaaaagagtatgttccaacgaaaggatgaccacagtggaaagcagaaagcagaattgagcttcaattatattgcaccagctcacaatgtcatatacagccactgagcatccagaggtcgttggtaatagtgtttttcctattacttgtggttgcactgagttctttttatttggaaaaggagta

SEQ ID NO: 789 - DNA, 954 bp, Solanum tuberosum
agtaaaaattaagaatacccacaaagcagaaaacagtttctgtcatgtcacttcttattctctgctacaactttcttgaaattaaaaaaaaggttcttccaaaaagttgaattttgctacagttcaagaagttttggagttcttctgattatttgtcaaagtgcaataaaactgaaactccgtaggtgaatcaactaacgacgaccatccattgatttaacactccctgttgttttaccaaagtctaaatccgtacccgacttctctccaagcaacatgaagcctccaaatttcaatcttgaatcagaagacgagtccgaggtcagcaactgccaagtgggttcaaacatatccgtccaagaaattcatcctggtccttcccttaatcttcagcaggaatcagttcctgttactcttgacttgattcttggcttcaacagcagtgactccgagttgaaagccaatggagaggcgactgacgaagtagtaccccatcctccaacggcagcactatccagagttttctcgtgcaatttctgcaggcgcaagttttacagctcccaggcgttgggcggacaccagaacgcacataagagggagaggactttagctaagagagcaatgcggatgggaatgttatcggacaggtacgctagcttagcatcattgccacttcatggggctgcatttcgatctcttggcgttgaagctcatgcttccgcacaccaacgcatctcgcaccaagaaacgcctattcgtgcagttagaagcggggctagatttgaacaaggctatttcgggatgccagtattcgtggaggatgatgaagtggaggtgttctggccgggtagcttcaggcaaatagaggggattggtggtaatatggggtataattcagggcaaagttcaagcataaattttgtagctgtagctcctcaaactaggacagatcca

SEQ ID NO: 790 - DNA, 936 bp, Solanum tuberosum
cgacctgttgttacctaagtatcaaatttgccccgcgttttttccggagcagcatgaagccaccaaatttcaatcttgaatctgaagacgagtccgaagtcagcagcagccaagttgcctccaacaattctgcccaagaaatttctcctgatccttacaaggacagcacgaccaattcgtcctgtctgacaaactctctcaatcttcagcaggagtcgaaaccggttacacttgacttgactcttggcttcaacagcggtgctgatcccgagttgaaggaaaatcccgaggctggcagtgaagtagtgcctcatcctccagctgcacaagtatcgaggatattctcgtgcaacttttgtaggcgcaagttttatagttcacaagctttgggaggacatcaaaatgcacataagagggagaggactctagcaaagagggcgatgcggatgggaatgctatcagagaggtacgctagcttggcatcgctcccccttcacggctccccatatcgatctcttggcatcgaagctcatggctccgtgcatcaacgtgcctcacaacaacaagaaaggcatatgcatgctattagaggcggggcaagatttgaacagggctatttcggggtgccagtatacatggaggatgatgacatggagatgttttggcccgggagcttccgtcaagttgacggggtcggtagcaacgtcgtgcttaattcaggtcagaggtccaacataaattttgtaccaatggctccaccacctaaaacacaaccatcattgcctgaccttaatttgaaactgtgacactcttgccattcacatttctatatctatttcgacatcctccttttccgaaaaaagaaaaacgcgatgttacgttgtgttacatctgcgttgtattgtacagggagattgattgaatgtcttagattga

SEQ ID NO: 791 - DNA, 985 bp, Solanum tuberosum
tttcacctttaaaaaaacttcaaaaacacccaaaaaaaaaacaaagaggaaaaaaaaaagaaaattatatttatcgttaatctgaagggtttccgcgtaaaaatcttgatagaactatgacgagcgtgttgggtgcagagtgtgacaaaatccgattggattatgaagcggagacggagctgaggctcgggttgcctggagccaatggaaatgaagttgaatcaactaataaaaacaatggcaaaagggtcttttcagaaactgttgatttgaaattaaacctttctaattcaaaggattctacattaatggataatattaatcaagttgataacatgaaggagaagaagaataatattgttgtgccaagctctaatgatcctgctaagccaccagccaaggcacaagttgtgggttggccaccagtgagatcattcaggaagaatgtaatgactgttcagaaaaacaccaccggcgccggcgaaagctccggcaccggcaccggcgcagcctttgtgaaagttagtgttgacggtgcaccatacttacgtaaagtggacttgaagatgtacaaaagttaccaacaactctctgatgcacttggcaaaatgttcagctcttttacaattggaaattgtgggactcaaggatttaaggatttcatgaatgagagcaaattgatagacctcttaaatggttcagactatgtaccaacttatgaagacaaggatggtgattggatgcttgttggtgatgtaccttgggagatgtttgttgattcatgcaagcgtttaaggataatgaaaggatcagaggctattggactagcaccaagagcagtggagaaatgcaaaaacaggagctgaacttaatgttccaattaattgttcattgtttttttttccatggtcaaactatatatttgaccttggagtttctaaatctattgtaatttgaagggtttatatatataatatataaaggg

SEQ ID NO: 792 - DNA, 939 bp, Solanum tuberosum
attacttatattacttttgcattttctctctcatattttttccctttctctctctttttaatatttgcatagtactactactacatattgaagaaaattattgaagaaaaaagagtttgttttttgatggatttgaaagaaactgagttgtgtttgggactacctggtggtggtggtggcggaggaggaggaggtgaattaattcgcgataataataataataataataagattaatgggaaaagagggttttctgagactgttgatttgaagctcaattttcatcaagctaatgatgatatttcttgtgctatggagaataataagatgaagaatagtgttactactactaaagaagttgtttgtaacaaagatccaatcaagccacctgccaaggcacaagttgtgggttggccaccagtgagatcatttaggaagaatgtaatggctcaaaagagcaacactgaagaaagtgagaagactactgttgcatttgtcaaagtttgcatggatggtgcaccttacctacgtaaggttgatttgaaaatgtacaaaagttaccaagaactttctgatgctttggctaagatgtttagctcctttactaatggaaattatgggtcccaaggaatgatagattttatgaatgagagcaaattgatggatctcctcaatagttctgaatatgtgccaacctatgaagataaagatggagattggatgcttgttggagatgtaccttgggagatgtttgttgactcatgcaagcgtttacgcataatgaaaggatcagaagctattggacttgcaccaagagcaatggagaaatgccagagcaggatctaagccaattgatggtgtgccaaaactccatagataatgtttgaagttgaagggtttgtgagattatatattgttgttttcatgtgcttgtatttt

SEQ ID NO: 793 - DNA, 1477 bp, Solanum tuberosum
gtttgggtatatcaagaagtgtaaatattaggatttttctaccattaatttgattcaaaattgaatcttgataagattttctttatcttctttcacacaaaattgaattcatttgggtttttcggttgagctgagattttgctgttggccttaaaagtccgtacaaatgaattattcaacatacactcagtttgttgcctcaagaaggatgggcatatgtgagccgatccatcaaatgggcatgtgggatgatttcaatgctagttgtccgagtacatcggcaaccatgattctagaagttgagaaatgcctagaggaccagatacctattatagacaaaagattagacattgagacagaagatacttcgcatggaacagtagggacttctaatagatatgaagcggaaacaagtaaacccattgagaaggtacttagacgtcttgcacaaaaccgcgaggctgctcgtaaaagccgtttgcggaagaaggcctatgttcagcagttagaaaatagtaaattgaagctgattcaattggaacaagaactagatcgggccagaaaacagggtctgtatgtaggtgctggtttagatgctagccagctaagttactctggaactgctagctcaggaactgctgtatttgatacagagtatggtcagtgggtggaagagcaaaatagacaaacaaatgatttaaggaatgctctgcatcattctcaaattagtgaagcggaattacgcattatcgttgatggttgcctgaaccactactttgagctcttccgcgttaaggctacggctgctaaagctgatgtcctatatatcatgtctggcatgtggaagacatcagcagaacgcttttttatgtggattggggggtttcggccatccgaacttctaaaggttctcacaccacatcttgagctcttgacagaacaacaactccgggaggtttgtaacctcaggcaatcgtgtcagcaagcagaagatgccctgtcacaaggaatggtaaaacttcatcagattcttggtgaggctgttgcagctggccgattaggtgaagggaattattctcttccgcagatggggcctgccattgagaagttggaagctcttgttaggttcgtaaatcaggcagatcatctccgccaagaaacacttcaacagatgtcccgcatcctgaatacgcaccaagcagctcagggcttacttgccttgggggagtactttgaacagcttcgtgttttaagctcacactgggctacccgtcttcatgagcctgcctaatgatgcaatagaagatcccttagtacaccattcgacgagttttgccttcagaaattatactatgtaagctaaaatttagctcttgtttatgtcaataaagctctcaatatgaatgtaggacattaaactagttgtacaaagggtttccgagagtctattgtggcttatgtttccgagcaacttttg

SEQ ID NO: 794 - DNA, 1466 bp, Solanum tuberosum
ggaattttgattttcaagattccattcaatttttcttctatgggtgtttagaaggatttaggcttttagagttttgaagtggggaaaaaaaggtttcttgaagactttgctgttgttggctttaagtccaaaggcaatgaattcttcaacatatactcaatttgttgcctctaaaaggatgggtatatgtgacccaatccatcagattggcatgtggggagatttcaaaggtagcagtttcccagataccttgattcttgaagtcgagaattgcctagagaacgagatgcctattatggagaaaagactagagaatgagatagaggaaccatcacaagtgactgttggaatgtctaacagatatgaacctgaaacaactaaacgtattgataaggtgcgtagacgccttgcacaaaaccgcgaggctgctcgtaaaagtcgtttacggaagaaggcctatgtccagcagttggaaaatagtaaactgaagctgcttcagttggaacaagaactagaacgtaatagacaacagggtctgtatgtaggtgatggtttagatgctagtcagataggttgctctggaaccgcaaattcaggaatagcttcttttgaaatggagtacggccattgggtggaagagcaagatagacaaacagatgatttaaggaatgctctgaactcccaaatgggtgaaatagaattgcgcattcttgtcgagagttgcttgaatcactattttgatctctttcgcttgaaagctacagccgcaaatgctgatgttctctaccttatgtctggcacatggaagacatcagctgagcgtttcttcttgtggattgggggatttcgcccctccgaacttctaaaggttctcacgccacatgtggaaccattgtcagatcaacaaatccaggaggttagcaacctcacccagtcttgtcagcaggcagaagatgcgttgtcccaaggaatggtaaaactccatcagattcttgctgaggctgttgcagctggtacactaggcgaaggaattatccttccacagatgaccgctaccattgagaagttggaagctctagttagatttgtaaatcaggcagatcatcttcgccaagaaacccttctacagatgtcctgcatactggctgcacaccaatcagctcagggtctccttgccttaggagagtactttaaacgtcttcgtgctcttagctcactttgggctggtcgtctttctgaaccggcttaaagaagtaagaaacaaccattatatatgctacctggggttttcaactttgccaatcaaagctgtgtgaggtaaaatctgcctcgtgttgctcgtaaaaactatgagttggcgctcattcagacactacaaatctgtatataagttctgctatgctgtaactggaacttggaaattgcgtttattttcttttcacattggttttgatgattgtaaatca

SEQ ID NO: 795 - DNA, 975 bp, Solanum tuberosum
ggatcggggtcaatggggcgatcaataagacctatggcctaggcttgtgacctccattgcactttggaggggtgcttgcctaaggtcggcccaagtggtcgagcctacgtcataatttgttacagcgggggcctgcgttcgcgcggcccctgcccaaatccttggcggagacattagctaacggatctcctgctactgaagggtcatcaggagatgtagctaattatatgggtcagatggcaatggctatggggaaattagggactcttgaaggttttctccgtcaggtaactctatttttgctgctgcttcctattctttgtttgtttaaattgtttacaatagataagctgcaaatgctcgttcagttgtttgaacatgtggaagtcgggggcaagcaaatgttgttctggaggtctttgtaactgcaaccagcatgcattgcccacagaatcttcagaatgtcttgtttgtattggtctttggacaaaaagtctggatactttgtcctcttgtatgtcctttaatgaggtcataaaataactgaagggttatgttcgccaacacattcttaaatcaacaattgtccttctgtctcatacttgtaactctcttgtgaattatatgattcaagacagccagtcatgttcagagatttctggtttgttatattagttttatgtcgtctctggaggcaaaatacgtgaagctaaaagtcattgcatctttctgactcttttaacaggcggacaacctgcgtcaacaaacattgcaacaaatgcatcgcatattgacaaccagacaatcagcccgtgctctacttgcaataagtgaatacttctcacgtcttcgagctctcagctctctttggcttgccagaccacgagagcaataagtatgacatgcatcgcaatactctactgaaactcggatatactacttcgatacactggccagtatatgagatccagctaa

SEQ ID NO: 796 - DNA, 980 bp, Solanum tuberosum
gtttagcacaaaatagagaagcagcaagaaaaagcagactaagaaaaaaggcttatgtacaacaactagaaacaagtaggataagacttgctcaactagaacaagaacttcaaagggctagatctcaggggattttcatgggaggtggtgctactggtcccaatatcagctctggtgcgtcgatgtttgacatggaatattcaaaatggttagatgatgatcagagacaaatatgtgagctacgtacagcattgcaagcacatttaggagatggtgaacttagaataattgttgatgcttatattgctcattatgatcacatttttttactcaaaggagttgctgccaaatccgatttctttcacctcctcactggtatttgggcatctcctgccgagcgcgggttcctttggcttggcggttttaggccctctgaccttatcaagatgttgattgcacaattggaccctttaacacaacaacaaattgttggaatttatagtctccaacaatcatcacaacaggctgaagaagcactttcacaagccttagaacaattaaaacaatctttaattgaaattctagccactggttctgtcaatgatggcatgcatcatatggctattgcattgggaaaacttgccaatctcgaaagcttcgtttatcaggctgataacttgaggcagcaaacgatacaccaattgcacagaatattgacaattagacaagcagcaaggtgtttcatgatgattggtgaatattatggtcgattaagagccttaagttccctatgggcatcacgtcctagagagactatgatggcagatgacaactcttgtcaaacaacaagtgagttgcaaatgatacaagcatcacaacaccatttctcaaatatgagatgataattattcatttctgatatctctataatatatattaattaatattactcttttatctgtaaatgtataaatcatttt

SEQ ID NO: 797 - DNA, 994 bp, Solanum tuberosum
cccttcttctttgtataattccataattcaattttaattttcttgaaaaactccaatttgcagaagagtttctttgtacttatgaacagtctatgaacatgagttctacatcaactcaatttgcccccacaagaaggatgggcatattcgaaccgttccaccatatgagtatgtgggaagacgcgtttagaggtgacattatgcccagtgttggtgcgtgtatggtcacaccggcaaatgacagggcagatgacaagtcgggatatacttctagtgaccaacttataccctctggctctgaggataatcaagcaggaaagagtgtttcagacaaggtacagcggcgtctagcacagaatcgtgaagctgcacgtaaaagccgtatgaggaaaaaggcttatgttcagcagctcgaaaaaagtaatttgaagctagcacaacttgaaatggaacttgagagagctcgacagcaaggactgtacattttaggttcaaatggtaatatgggcctaagttcaacaattaatccaggaatagctgcatttgaaatggaatatagtctctgggttgaagagcaacaaaaaaagaacgtagagttgaggaacatattgcaatcccatgtaagcgaagtggagctccagttgctggtagaaaccgtcttaaaccactactacaatctcttccgaatgaaagctgatgctgcaaaagctgatgtgttttacttgatatctgggatgtggagaacttcggtggaacgctttttcctctggattggaggattcaagccatctgaactcataaatatcgtgatgccacaacttgagccattgtcagatcagcagatcgtgaaaatctgtaatctgcgacactgttgtcagcaagctgaggatgctctcactcagggaatggataaacttcagcagactctggcacagaacatcctaactatgaccactggaacgggaaagtacagttctcagatggtttctagtat

SEQ ID NO: 798 - DNA, 844 bp, Solanum tuberosum
cattcacacaactttcccaaaagtggagcaaaagctctagtataatagtcatgggctgagctcacagaacatttagctgaatggatgcaatgggtgatcgggaaggccctaggcttgtgagctccactgcactttggaggggtgaccgccggccagcacaagtcgtccaagcatcgcagttggagcaaaactttcagcgagcacctcaacagggcgaaagtgatgccgttctgcagggcccttaccatttgatatagaatatagtctatggttggaagaacacaccaaacacatcaatgaattgaggattgctgtcaattcacatgcacgtgatcctgaactgcgaagtattgtggatagtgtcattgcacattacgatgatgtctttagggtgaaaggaaatgcagccaaggcggacgtattccatgtcttgtcagggatgtggaaaacccctgccgagcggtgttttatgtggattggtggcttccgcccctcggaacttcttaagggcctgtagcatttgatgcagaatatagtcgatggttggaagaacacaccaaacacatcaatgaattgaggactgctgtcaattcacatgcaagtgatcctgaactgcgaagtatggtggatagtgtcattgcacattatgatgaggtctataggatgaaagcaaatgcagccaagggtaacatagagcatctcttgtcaggaatgtggaaaacccctgctgagcggtgttctatgtggattggtgacttccgcccctccttactgcttaagcttctagtcattcaggtggagcctctgaccgaccaacagataattggcattgtcaacttgcagc

SEQ ID NO: 799 - DNA, 985 bp, Solanum tuberosum
gatatttattggcttaaaaaacttaaaaaagtcttagttttttttttctttttccggagagaaatatggatagagtattttcagtggacgatgacattggcgaccatttttggtcgacgccgccgacggcggagttgggcgttgattcacctacctctgccgccaccgccgccatctcctactcgaagatgatgaatcgcagctcttccgaatgggctttccagcgtttcctacaagaagccgccggtacgaccacttcatctcctcctctgccacctacaatggcgtcttcgtcgtcatcttcacaccaaaacgatgttgtcgagatcaaggatgagaatctttctactcctaatctcaattccagtacggcgttgaattcgaagccggcagcgacgtcgtttgcctctgcacctccgcagaatattcccgttgatgctgaagagtatcaagccttcctcaaaaatcgcctcgatttggcttgtgctgcagtcgcattgactcgggcgaagaatctaaagcctcaagattcaagttctattgcacctgataaaggtccagagactgctagtgcatcacaatcagtatctcacatctccactaaaggatctggtcaggaagtgagaaaagttcaagataaggattctggtggaccagttggaataccctctttaccctcagtgcagaagaaacctgtggtgcaggtgaagtcaacaactagtggttcatctagagagctatccgatgatgatgaagctgaaggagaagcagaaacgactcaaggaacggatccagctgatacgaaacgcgtaaggagaatgctttcaaatagagaatcagccagacgttcaaggagaagaaagcaagcccatcttacagaacttgagacacaggtatctcaactgagagtagaaaactcctccctactgaaacgtctgactgacataagccagaaatacaatgaatcagctgttgataatcgtgt

SEQ ID NO: 800 - DNA, 859 bp, Solanum tuberosum
  misc_feature (572)..(572): n is a, c, g, or t
tattagtagtagctaagaaaaaaaaaaatggtgcaagaagaaataatgagaagaggtccatggacagaagaagaagatgtgcagcttttattttatgttaaattatttggagatcgacgatgggattttcttgctaaagtttcaggtttgaaactaaggtgattggcgggagacaaattataaaacaaaaaatacatcatagtatatatgcataatattagtacaaacaaatagtcttctcttttatcccaaataacagttaagtttctaatctcttctttaattacttttaattttactctattttaattttttatatatatagttgtctgtgatgtatttatgtttatatctgtttagggttgaccagaacaggtaagagttgtaggttacgttgggtcaattctttgaatcctgatctcaaacatggcaagatgactccgtcaagaagaacgtcttgttcttgaacttcagtccaaatggggaaactaccatggtcccgaatttgcccgaaaaataccatggcgtactgatacacgccacttccgcacttcctggacaacccatatgangcacgcaagtccacgacccgacgcacaaagtctcctaatttctaccatactttcatcatcttcttacttccttcaagtcactccccgaagaacactcgcacgaaacttctaacgatcaccggtggcatccaggtccttgccagttgcaggtgcacaacaattcacgtgatcaaaaccaccttggcacccaggttccgaccagtttaactccaccatggcttcaacacccgcgcaccccactcacgggcctttccatttgcacgcaacacatctggagtcacaaccca

SEQ ID NO: 801 - DNA, 705 bp, Solanum tuberosum
ttttttttttttttttttccgaactgtttgtctgttccttttttacaaaaaaagagagtaaaaattacataaattcattagtagaatcccaaatatttggaatattatcaaagtttaacatgttgctgcagtagctatctctttcatcttcagtagttgtgctgctgctattgttgaagtaagttgagtttgaattcaatggcgtaggacttgatgaaggtgtcgataaattcgacaaaacaactgattggaagttaaaattgttgttgttgttttcgttggattgaaatgttgaaccatcggatgttagaggatcatagtacccataattttgtaaaggaaaataatcatccgttaccccattgcttaattgccactcatcattaataacttggcaattattttgtgagttactaaagttttcaagatttgatgagaaatcctccatttttgttgttggtggctgcatgagttgagcttcatgactagaaaatggaacacatggggttgtacttatagttgtgcaagttggaaaatcttgaataggggcttgaatttggttactttggaccatttgtggcaattggttctggcaaatttgattatctgggatcaagcaagttgtatgagtcttgggcggttgggatgactcacaagaccacgtagctcaaatctccaagaacttccagggatttaacccaaaag

SEQ ID NO: 802 - DNA, 912 bp, Solanum tuberosum
ccattttctctgttttgcgttgaagttgttgctgtggtttaatttgttttgtctttttggaaaaatatagagaaactatgaagaattgtgaactttgtaagggattggctaggatgtattgtgaatcggataacgctagtttgtgttgggattgtgatgcgaaggttcactcggcgaattttttggcggcgaggcattctaggtctttgctatgtcaggtgtgtcaatcgccgacggcttggtcggctgccggtgcgaagctggggaagacggtttctgtatgtgagaagtgtgtggatggatactaccatagggatgaagtggatgagagtgagagcgcgaatgatgaagggagtggtacggaggacgaggaaactgattatgaagaggatgaagaagatgaggacgaaattgattcggagggtattcaggttgttccgtggtcaaatacgacgcctccaccgccggctagttcatctagcagtgaagattcatcaaatggctgtagaaatgtctctttaaagcgaatgcgtgaagctgatccagatcttcattcagatgacgacagcggaagttcgtcatgtcaccggaaagttcatacatcgccggcgatggatgcagacggcggagacgaggcagcagctattgttgactcatactcatcaaaaatgagaacgccggctaagatccagagaacagatcgtctcacggctcctagatgcacgtcggtaatagagtttatcaggagaaataaccggcagaggatgagctccggtgcggcgatcgccgagctttgtagactcaataatgactccaggaccatagatctggaaagctcagagacatcgtagccgtctgattgaccattcgtttccatcacattacgtggattctactttacttaccctttac

SEQ ID NO: 803 - DNA, 933 bp, Solanum tuberosum
gatgcaatatttcttgttgatatcaatcctccagacactaagtttctgggagcatctgaagtccatgctggccagtccgatactcttcctcctcctcttcctgctgctgctgcatcgtgtgggcaaagttgcccagttggtagcccatcgtctaccgcagcactgacgaagcctcgcatgcgatggacacccgagcttcacgaagtctttgtagaagctatcagtaagcttggtgggagcgaaaaagctacaccaaagggagtgttgaagctcatgaatgttgaaggcctaaccatctatcatgtcaaaagccacttacagaaatatagaactgccagatacagaccagaaccctcggaaggaacaccggaaaagaagaccaccagtgtgacagagatgccatctttggacctgaaaacgaccatggggataacagaagcactaagaatgcaaatggaagtccaaaagcagcttcatgaacaacttgagatccagagaaagttgcagttgcggatcgaagaacaaggtaaataccttgaaatgatgtttgagaagacaaaggacatggggaaagatttaaaggtatcatcatcatcaagaacagatgaacatccttcaccatccaacaagacgaagcatacatctcccaacgacagatcagaagcactcgagaaagatcctgtgagtttgaacgatcgttcaagttctggagggaactcaccaaacaagaaagctcgtcaagatcatgaatcagatgatagagacttgtgttgttcacctccatcgaagcgagcaaaaacagaggaaacatcaggtcttcatgaatcttgacactcatttgatatgtgaattgtctttacaaatgctgtttgacttgatgaaagcttttagttaatagttgtgtgattttttcttgtccattctcttttcccc

SEQ ID NO: 804 - DNA, 953 bp, Solanum tuberosum
cagctaattaatgatgatgacactctcggtcttggttcagctggagtgatatcctagtagatgtcaattttcctgatccagaacctaagcaactgggagattctgagatcacttctaaccagctgcaacctcctcctcctacttcatctgggcaaagctgccccattggtagcccatcatctgccacatctaagcctcgaatgcggtggacaccagagcttcatgaagtcttcgtagaagctgtaaataagcttggtggaagcgaaaaagctactccaaagggtgtcttaaagctcatgaatgtgaaaagcttaaccatctatcatgttaaaagccacttgcagaaatataggactgccagatacaaaccagaaccctctgaaggaacttcagaaaagaagccaactatcatcacagagatgccatctctggacttaaaaactactttggaatctgattacaggactacagggataacagaagcactgaaaatgcagatggaagtgcagaaacagcttcatgaacaacttgagatccaaagaaagttacagttgcggattgaagaacaagggaaataccttcaaatgatgtttgagaaaacaaaaaacatgggaaaagaactaaatgtatcatcatcaaaatcagatgaacctgcttcaccatccactgaaataaagcatgcccctcctgatgacaaatcagatgcaccggagcaggatcatgtcagcattgaacttagttcaaatgttgcttcaagctctgcagatgatctcactgagaataaggaacgaaaatcacccgaaaggaaagcttgtgagaatcatgacttagatggtagagacttaagttcccctccagcaaaacgtgcaaaatcggaggaaacatcaccttcgtgaccttgacacactttttgtaacttcgtagaaggaatagtttgcatgtgaaatgtggtg

SEQ ID NO: 805 - DNA, 977 bp, Solanum tuberosum
cttttagagagagaaaaacagtacattagataacttcttgtgaatttttctctctaggttagtgagaattttaggtgaatagagtgaagaacaagaaaaaaaaaatggctaatcgatggtgggatggaaatacagcaatgaatccaatggtttcatcaagtaacaatccagaagaagaagaaaaatcaaacaaactccgccccggaaaagagcaagagttcatgaatacaatcaccaccaccaccaacagtagtgaaaacccaaatgaaatgagtcaggaaggagaagaaaatatacagagtcctgaaggtctgttctcctctggaccgtccagctctatgcgtagagctggacggcgacccagaggaagacctatgggctcaaaaaacaagcccaaaccaccaatagtggtaactaaagatgccccaaattccctcaaaagtcacgttttggaaattaaatccggaagcgatataatagaaagcatagccgctttcgcgaatcgccgcagctgcggcgtatccgttttgagcggcagcggtattgtaacgaatgttacgttacgccagccggccgcggtgaccgtggccgggggcgtaattacgcttcacgggaggtttgagattttgtctttatccggcgcgtttttacccgcgccgaatagtccagttggagcaactggactaactgtgtacttggctggtagccaaggacaagttgttggtggaaatgttgtgggtgaattaatagcatctggaccagttattgtaattgctgcatcttttacaaatgcaacatttgaaaggttaccaatagtggagaatgatgaagaagaagaggagaataatgtaaatgaagggatgcaaatgcaattacctacagcttcaggggttggtaatgtaaattctgattattttgcagttgatcatccatctccttctacttctatgcctatgtacaatttagccactaatgtt

SEQ ID NO: 806 - DNA, 567 bp, Solanum tuberosum
aaaataaatatttttccaccatttttttattgcactttgagtacacaataaatgatacagcatatgacacttctataaaagaatatatctttaacaagaattttctaggaactcacatgggagagtccagaaaatatgacttctctctctgtattgtccctaattttttttcccctaatagtaataaatataaataaaattagtctatgtaagtgatgctgttcaagaaaaaaattaacttgacatcacatgtaaaaaaaaaaaaaacttttttttttgttttttctttcaaagaataattaaataattgaagtgagatcttgatgattagcaaaaactccataaagggatatctgctgatgattcttcataataaacatcctccattgaaggtggatcaaagaaaactgtaccatgtaacatgtcattatactttggtgaatcaaagttgtaccattgctcaatcattgacatctcttgatcaaaagtataatttggtaataaacaaacatcatttatatcctcagaagaagtagtagtagaagaagaagaaggtggtggagatgg

SEQ ID NO: 807 - DNA, 721 bp, Physcomitrella patens
tgatcccgatcacaattcacgagtgaagattaatcaatggaggtttcaaggtaataaatgatgtgcgagaaggagcagacgccccgaaaattccatgttgtagcattctcagctgttgtacacactccaatggcgttgtaatctatcgatacattgatgatgcctaaaccagcggttcctctacgaagctttgtgagagttgaaaggggataatgatcgtccccgctctatgtaccgaaacaccactctccatgaaccaagagcttttcgtgaagaactctacagtattctgcacaaaaattgcaacaggagagccatgatccttccttagaccagcagctcatccttcacacgcggccgcttaagctcatagctttctgcggaggccacagcgctaggcctcttgttgctcgatgcgatcgcaatcttcgtaagactgtggatacatctttgcttttgagaattcttcgccgcttgtcggcaagatgaggacgacagcggagggcgaggcagtgattcagggttggacagagcggtggtggctttgagtgggaagtttaagagagcgcgtgagcctcgcatattaagagctgctcgatcgtaagccaatgctgcttgctctgcagtatcaaaggttccaagccatacccgtgcaccgttcttggctgaatctcgaatttcggctgcgaatttcccccaaggccgctgtcttactcccctg

SEQ ID NO: 808 - DNA, 655 bp, Physcomitrella patens
tattgtacaatatcccgaggaagtgctatctcgcgcttcctacacaaagatttgtaaaaattggagggtctctggaagcaatggcttcgaggcgctcaagattcctagtaagttcgctaacagtaccaaatgcggtggccttttagaggaatatgacctagagcttctcattcttcgcatcgatcacgcctatttgtggtaatttagattcttccatgctctccgtgatgatctgctgcgcgagcgtcgtcctgctcgattcgataggtttctcgatgcgagggtttctgcttccttgcctggcatatcgttcaagaaaggagcctagaagagaagaattctagaactgctgctgctgggatagaagtgatgctgaagcggccgaggatttcttggaagtgcgtgaggtggaggacgacacagggagggggtggcaatgactcagggttgggacagagcagttgtggccttgagggggaaattcaagagagcgcgagagcctcgcatgttgagtgctgctcggtcgtaagccaatgccgcttgctccgcactatcaaaagttcccagccatacccgggcaccatttttcgatgagtctcggatctcggctgcgaatttaccccatggcctttgcctgacgcctctgtaatgcggc

SEQ ID NO: 809 - DNA, 725 bp, Physcomitrella patens
  misc_feature (70)..(70): n is a, c, g, or t
  misc_feature (200)..(200): n is a, c, g, or t
  misc_feature (454)..(454): n is a, c, g, or t
tgcttgtttttactggcaccttagtgcaaatgtacatccggactgacggtcgatcgaactattgtacacnaaatccatctaaatgaaaaaagcactttgggagcaaactaatcataggggatgcagcccggacaacctaattgcctcatatctggatcgcgaagtcgaatcgacaatctggcagccgcaggaaaaatcangctgttgctaatttactttacaatgttcaaaaacctcctttgttttgtatcacacgtgatatcccaagaggaaacaaagaacttctcttgatgcatgcagctgctcaccatgggttttcgatccatccttcgcacatgatcacgcctcagctcgcaatctctttgctgtttcaagacgcacgctggagcagaatcgcttgttggatccagtcagtttcttgcagggcatttgtgagatgctttcgctggttggntgagttattctggatgcattgcggctggtggaggaaggctccggagcaggagggaaagactcggggttggacaaagcagtggttgccttgagggggaaattcaagagcgccttggagccacgcatctggagcgctgctcggtcatatgccaatgccgcaagctccgctgtatcgaaagtccccagccatatccttgagccgttcttcgaggaatctcgaatctctgcagcgaatttcccccatgggcgttgcctcacgcctctgtaatgtg

SEQ ID NO: 810 - DNA, 711 bp, Physcomitrella patens
  misc_feature (381)..(381): n is a, c, g, or t
  misc_feature (684)..(684): n is a, c, g, or t
ataattgatggcatatctatttcatgaaataagacatttcttaaagcttatatttatataaatatgaatgtatgttcgtgtgtgagaggttgtgatggaaagtgccttccatttaatccacagagctctaccttgttctataagaattaagcacatgggagggccaaagcatattgaccctcatgaccatgtgcgcttaaaacacagtaaatataatagttcttcagtgatgtagggcgacgtaaccgaaaggggtcacgtcgaattatgatgcagattcttcacagctacgaatcactgcatctgtataattttatttaaatgtgcagtcgatggttggatgtcgcattgtagtaatattgtagtttttttttccattanaatggaaatttgccttgaaaatggatggacctttgtagctgaacgtattgtcactggccatcttcctcagtgaccatcttcctcaatgtccatttcagtggtcatgagctccatttctcgaggatctaacttgttgtagatcttaagctggcttggacgtaccctgtccttctgaatgtctatttcaaaaccaggaacagcaacacgaagcgatgagacccgccgatcattctcgatacccatcggagtaggatccgaataaaacaaggaacgatcagtcggctctatgcaaataccccatanagttgtccatgatcatgcctgggaatg

SEQ ID NO: 811 - DNA, 720 bp, Physcomitrella patens
aacgtttaaaatcggaggaatgtgctgctccatgtgaagacacaggaaacatgcgcggcatgtccaccttttctagcgttcgaaatcaacaaaaagaaataacactaccggaacctcctgctctgtcctgcctcctgcagtgtccatcagtaagcgatgccctaccaggggaaaagaatggcatgacttagcgtctccgactgtatctttttacattctgcgtcaggcgctttcaacacaaggatagctctacactgttcttacagcagtcttaaggcaactcctctatggtacataaaataggcattcgacgtgaaacactcaacttgattgaagcaaggttgatcatacagatattcagaaagaaggcaccactccaaaacttgagtccatagagcaagagctgaacaactgctccacatcggagtccgtcctcttcgcgaacctgcctttgatcctcggccggccctcggcgtaagctttcctggatgcataccggatggttttctcaaacttgcgtttctgcctcttctccttgtacctcatcactcgagcttcccgatccactgtgtcgatgggcccgctcacctgctgcggcatgcgggtgccagacaactcttgagcaccttgagaatccagtggatagggtgttgagatgtcacttagactggagtccgggaccacggcagcgtctacagacgagcacgaaatgctgtgggt

SEQ ID NO: 812 - DNA, 579 bp, Physcomitrella patens
  misc_feature (119)..(119): n is a, c, g, or t
  misc_feature (257)..(257): n is a, c, g, or t
  misc_feature (288)..(288): n is a, c, g, or t
  misc_feature (348)..(348): n is a, c, g, or t
  misc_feature (355)..(355): n is a, c, g, or t
  misc_feature (422)..(422): n is a, c, g, or t
  misc_feature (460)..(460): n is a, c, g, or t
  misc_feature (548)..(548): n is a, c, g, or t
  misc_feature (556)..(556): n is a, c, g, or t
tctgctgtacataaattatacttccaagtatccaccacttccagagttcaggagagagcgagagagagagagagagagagagagagagaaaacagagaaaagagcactaccagcactcntgctctggtctgcttactgctgtgagtatgtaattgaagccctaagtggggaaaaaaattggtatgacttagtgcctctgactatattttttttgcattgggtgtcgaaaactttaattctacactatttttacaganggtccttcgtagtacatcaaataaaaattcnacgtgaagcattggaattgaccaagactgtgttgatcattcaaatattcaacaagaaganggaaccnccccaaaacctgaatctgcggtgcaactactaaacatctgctccacatcagagtccgttctcttggngaacctgcctttgattctcggccgactctcggcgtaanctttccttgaagcgtaccggatggtcttctcaaacttgcgcttctgcctcttctctttgtatctcatcactcgagcttcccgatccantgtgtcantgggcttgctcgcctgatgcggc

SEQ ID NO: 813 - DNA, 2594 bp, Physcomitrella patens
gagggtttgaggtgcagaagaagagccccccgccatagccactacaaagcatacgctgcaactccacagttaagcttagcttgcgagttaccgagtgtcgagagtacagctacttttgcctctggagttccacaccacaggagagcgcagaatcagttccctggtctcgcgacgagggtcgctgtacagtcgcttactgtgaggtttcgaaaaacggaacaggatactggaagcgttttggctggggaaggagtgggaatacggttgtcgcgaaggggtggctcaaaggctgactgactgcaagtgctttttgaaactaagctgccacaagtcgtggcgcggttaagtgcagataggtggtgcgaggtcgtggaaggtggtggtccagttcacagcggagcttgactcggcgactgaggggaggagacggagacggttcgaaagagttggaaacgagggcgttccattgcctttgacctagtcgtaaacgtggctggaagttgtaggatgagctggaagccgcatggtccacgtcaacgtcaagttctggacgaacatgcctgcagcttagggaagagataatgaagtttagcaacgaagttgtccacaagtctatgaacatcaccgaagattgcagcgccctgaccggtgcgctgctgaagtactcaaccgataagtcaaacatgaacttcgagaccctttacagggatgcagctgtagagtcccctcaacatgaagtcagtaacgagagtggcagcactttgaaagagcatgactacttcggtctctctgaggtatcgtcctctaacagcagcagtggcaagcagccggagaagtgttgcagagaagagctgaacctgaacgaaagtgccactacgctgcaactcggccctcctgcggcagtgaagccgtctggtcatgcggatggggccgatgcacacgacgagggtgcgggtccagagaaccccgcgaagagacccgcacaccacatgcaacaagagtctcttgcagacgggaggaaggctgccgcagaaatggggtctttcaagatccaacgcaagaacattttggaggagttccgggccatgaaggcgcaagctcacatgacgaagtctccaaagcctgtccacaccatgcagcacaacatgcatgcatccttctctggtgcacagatggcgttcggtggggctaagaacaatggtgtgaagcgagtcttctctgaagctgtcggaggaaatcacattgcagcgagtggtgtgggcgtgggagttcgggaagggaatgacgatgtgagccgttgtgaggagatgaatggaacagagcagctggatttgaaggtgcacttgccgaaaggcatggggatggcgcggatggcaccagtatccggtggtcagaatgggtcagcttggcgtaatctgagctttgacaacatgcaaggtcctctgaatccgtttttccgcaaaagtctagtgagcaagatgcctgttccggatggtggtgattcatcggcgaatgccagcaacgactgtgcaaatcgcaaggggatggttgcatctccctccgttcagccacctcctgcgcagaaccagactgtgggttggccacccgtgaagaacttcaacaagatgaacacgcctgctcctccggcttcgacccctgctagagcttgtccgtcggtgcagaggaagggcgcttcgacgtcgtcgagcgggaaccttgtgaagatctacatggatggtgtgccgttcggtcgcaaggttgacttgaagacgaacgacagctacgacaagctgtattcgatgctggaggatatgtttcagcagtacatcagcgggcagtattgtggaggtcggagctcaagcagcggggagagtcattgggtagcgtcgagcaggaagctgaactttctggaggggtcggagtacgtgttgatatacgaggatcacgagggagactcgatgctggtcggagacgtgccttgggagttgttcgtgaatgctgtgaagagactgcggatcatgaagggttcggagcaggtcaacttagctccgaagaatgcagatccgacgaaagtgcaagtggcggtggggtgaggagattgcaatggcgggatgtgcgagcgtggagggaagggggttgggtgtgcgcgtgcgcacgtgatgtggggttgcagtggtggctgttgcacccggtggagcaagagaaagtgaaggcgggtgcatcatttttcattgatcggcagtcgtggaggaaggcgaagggggcacagtggcgatggatgtcagtgtggagcgttacataaagtcggtggcgggaggcggccgttttttttaaagaaactttatttatctttattttttttatttttttggaatttgcaatgggaaagaaattggagttagaatattttctcgattcgcgtatgtggcgggttcggggtaggatgggggacatactggggggcggtagtgtggaggcggaggaggaggatggaagtgtagatcccgagtgcatgggtggaacggtgtgcagtgcgggacgtgctgtattttgtagtttcctgttgtgaatgttatttatttaagcctctccgc

SEQ ID NO: 814 - DNA, 2174 bp, Physcomitrella patens
agcctactccgccgcagccgctgccaagctttgtcctcctcctccctccgccatagtcgcactcttgtcgctgttgttccgcttgctcccaagtgagtcgcctcgcagagacgagttggaagctagactgccaatgtctacaaagttttatgatgggatatgtgtgcggttaaaaacaaaaacaatgaacttttagcagtgaagttggacattattcaatgaacgtcagcgaaggttgtagcaccctaactggtgcgcagctgaagtactcaaccgacaagtcaaacatgagctacgagaccgtttacagggatgcagctgtggagtcccctcaacgcgaggtcagtaacgaaagtggcagcactttgaaagagcatgactacttcggtctctctgaggtattgtcctctaacagcagcagtggcaagcagccggagaagtgttgcagagaagagctgaacctgaacgaaagtgccactacgctgcaactcggccctcctgcggcagtgaagccgtctggtcaggcggatggggacgatgcacacgacgagggtgcgggtccggagaaccctgcaaagaggtccgcatatcacatgcaacaagagtctcttgcagacgggaggaaggctgccgcagaaatggggtctttcaagatccaacgcaagaacattttggaggagttccgggccatgaaggcgcacgctcacatgacgaagtctccaaagactgtccaaaccatgcagcacaacatgcatgtatcctactctggtgcacagatggcattcggtggggctaagaacaatggtgtgaagcgagtcttctctgaagccgtcgtggcgaatcacaacgcagcgagtggtgtgggcgtgggagttcgggaagggaatgacgatgtgagccgttgtgaggagatgaatggaacagagcagctggatttgaaggtgcacttgccgaaaggcatggggatggcgcggatggcacccgcatccgggagtccgagcttcgacaacatgcaaggtcctctgaatccgtttttccgcaaaagtctagtgagcaagatgcctgttccggatggtggtgattcatcggcgaatgccagcaacgactgtgcaaatcgcaaggggatggttgcatctccctccgttcagccacctcctgcgcagaaccagactgtgggttggccacccgtgaagaacttcaacaagatgaacacgcctgctcctccggcttcgacccctgctagagcttgtccgtcggtgcagaggaagggcgcttcgacgtcgtcgagcgggaaccttgtgaagatctacatggatggtgtgccgttcggtcgcaaggttgacttgaagacgaacgacagctacgacaagctgtattcgatgctggaggatatgtttcagcagtacatcagcgggcagtattgtggaggtcggagctcaagcagcggggagagtcattgggtagcgtcgagcaggaagctgaactttctggaggggtcggagtacgtgttgatatacgaggatcacgagggagactcgatgctggtcggagacgtgccttgggagttgttcgtgaatgctgtgaagagactgcggatcatgaagggttcggagcaggtcaacttagctccgaagaatgcagatccgacgaaagtgcaagtggcggtggggtgaggagattgcaatggcgggatgtgcgagcgtggagggaagggggttgggtgtgcgcgtgcgcacgtgatgtggggttgcagtggtggctgttgcacccggtggagcaagagaaagtgaaggcgggtgcatcatttttcattgatcggcagtcgtggaggaaggcgaagggggcacagtggcgatggatgtcagtgtggagcgttacataaagtcggtggcgggaggcggccgttttttttaaagaaactttatttatctttattttttttatttttttggaatttgcaatgggaaagaaattggagttagaatattttctcgattcgcgtatgtggcgggttcggggtaggatgggggacatactggggggcggtagtgtggaggcggaggaggaggatggaagtgtagatcccgagtgcatgggtggaacggtgtgcagtgcgggacgtgctgtattttgtagtttcctgttgtgaatgttatttatttaagcctctccgc

SEQ ID NO: 815 - DNA, 763 bp, Physcomitrella patens
tgattatccaacgtgtaatgaatgtatctaagcgagaaaataatctgtgatctgagagtcccttcataccaatagattacattctatgtgcatgaaagacctctacacttcactctgggcagcacgacttaagattgtggacaaattgcagcagaaactgagaagccacctgagagctcccaatttgcctttctgcctatacagattattatctatgtttctggccagggaccgtgcaaaccccgtttctgtagtgcaaatgttctcaaacgatgtccttgggtgcacctgaggaggccacatttgcatagtacttcacctatccgaagctgacgcagtaggtccatctccttgtatccaaccttttgaaaggagcagttcataaacacgatcagtcttcacgggatccactttaaacatttgatgtgcatcggaccttcgaacttgccccgacttcaagctctccagcatgagatgttccttcatccttaagtaatgagcaggtatgagcctgtgctgtacacatagatcttgctcagtgtgagagagtaagtccacaccaggaaagcctccaagttcaaaagatgctgaagttcttttcgagctctttccaccagaacctgctaggagactgctcccaattggcagaagatggggacctactcgtcctttcgggacctcgcgcgtactgccaggaaatgcagcttccccttccttctccctactcaagtaccgattaactcgatgcgttgaaaatttgcca

SEQ ID NO: 816 - DNA, 805 bp, Physcomitrella patens
ttttgaattcagcatgcaggcacaggatatccaacgtttggctaggcatttccaggcataaacgtgcataaaaattagcatctccatgagcaccaagaagtggcaaacccatctattacaagtcagcttccgatttaaacctcatatgctttcttacagccataatttcagtgaagtttcggcgagtgcatgtcctcttctgatagtcgattgactatagatagattagaattttcttggccgcctttagctgtctcgtccttcgttggatcatttaatagatttcaacgatcgggctttaattcctctacgccgttgattgtgctcaggattctctatatcagccttgtccgtaggaacctgattgtaattttcactggagccttcgatcgccactttcgagtgtaattctggattcaagttcacatctacatcagcagcacccgttcttcgttttagccaagttcagacgaagagtacgcttgttcattagagcttgatggtgttcacagaaagaaaaaccttcttcggtctcccgtgtgcactgccagcccctgccatcatatcgcttacactgcctgggtccaattgcgagctcatgctgggaagaagggtggccgtctcctgcgtttcttgaattccactttctcggccaaaggtaaatcaatccctaatatatgacaatttgaagacttatccttagtacctttcgaaccaactgccgttttcaaacgtgtctgcactgagccagcaactcgcttccttctaccactatcaaaacttggagaattgccactcatgtccc

SEQ ID NO: 817 - DNA, 735 bp, Physcomitrella patens
aagacctgccagcatgcgtgttaaaggtgagaatgtgacatgtgcttcgaaatggcgctcagtatcgaaattctaccagtagtcgatgaaaacccaaaagcataaaaagtagctaggtgctaagcttgggcgaggtcctagtctactgcaattttggagcacaagtagaattcgagatatcagtagtgtaaaagaattaagctaacgggtaaaacgttactgctaagctgcattcattcatacaatcaatcaatcaatcaataggcgctatgtaacataactagaagcagtattcaatctgggtagtggtcgagatctcccattgggtttgtgaccctatctccaggagtcgaaaattcgtgcccagctgtgtccaccatgtgagggtcttcaagcgtatgagagacctgtgcctcatctgcgggagtagtagccgatttcttcttcttcttcgatctacttcccggcttgcatcgcagcttgttgaggtgataatcgcatagttggtacccaggttttgccaacaaggggcaaatccaccccttcccgtcggttcggctgcactggttaccgagctcttcagcattctcttgcttcaaatatttcagctttttcggtcgtccacttcgcacaggcctacttttcacttgaatctctagttccgatgatgctacctcacgttcttgagcaacacgattcctcttccatctctgagcaatgatcgggagcttgccc

SEQ ID NO: 818 - DNA, 602 bp, Physcomitrella patens
atcggagcagatgtgttagaataatagaaaatgacatcctttctctagatgctcgatcctcttgcaaaccgaggcgtgatcactgtaaaaaagtccgcctggtggttcgcgctaataaaacagcattgtagctgttaggatatttctctactaaaaagtttttttgaattttttaaatttcaatcataagtaattcactgcttcaataaaactgaaataagtatggtcagacaatagctcaatcgataagacctagataagtccagctgcaaagttcgctccagcggatggaaagagattgatggagatccgctagcaacaattcagaaactcgttcttgacttcagaatggacagtccaacttctgtcaactgatatgcaaggaattgagtctttatccactaaactgaacaacagcatcatatgacctggtcattgagcgctaccgaaacagatccatctcgccgaacacactggagaagatacccgcaactgtcctctggtttcggcccatcggattggaacatcgcatgggtgacaaaactcgaaacgccaagaaactgagttacgaaaaataaaatacgtgaaactggcgagcttcc

SEQ ID NO: 819 - DNA, 774 bp, Physcomitrella patens
agcgggggcagtacaccccattcccttttaaccatcgtacattctattctcagagtaaattctaaaagccaggtataaaatggaagctctagagaaaaatgtatgtaaatgcagagaaaaactctacaaagacaccgcactgaaaactagatacagatcttttgcaatggccaaagattcaaccaatggctttcgtgataggttaaaggctagcccaaactttgtgtggttttgacctaccacctttctccagagactgttttcaatcaaattctagtaaatacaaaaataactagatgactattaacagaccatgtgtccatgacaagacattcttgaagtcgttgacacggccctaatacagaagtctgtcgcgacttttgcccctatccactgtggaggtgcttggatatacattgcgatgcatccaacactgcaccttacaaagtgacagcatttcaattttgtagaatttatccaaaacatggataaaaaatctgtgacgattcatctgctttgggccattcaaacggtctcttcaaagcaccattcccaaccttaccgattgttagcagcactactagcagcaccgaaggcggccaaaagcttgaccaagtcggtgactgaggtatcttcccgcccatcagaagatccccccgaggaccttgtctgtgctccccccgcagcacttctacgattgtgctgatactcgtaagcagcagttttcgacgttcgtgcagttgacagtacgctcaggaaatcagattgcttaag

SEQ ID NO: 820 - DNA, 1837 bp, Physcomitrella patens
  misc_feature (1835)..(1835): n is a, c, g, or t
gggatgatgcggtggctgtttgtttgatcaagataaacatggaggtgggaactgccggaactcatgtcaacgctgtctagatatttatagtcggtaagggccaagcgtgcgtgtgtgcactttgtcgaggattctgccaggaatttggagagcggtcgtcgcgtgcttagtgggttacagtagtgtacacttagtgtgtgtgtgtgagagagagagagacacacacacagcgagagtaactggagtgacctgggagttttaaagtttttgggttcggctggcggtgcattcaaagaggggattgtagcagcggcagagatggggagggttaagttggagataaaaaagatcgagaacccgactaaccgacaggtgacattctcgaagagacgcaacggcctcatcaagaaggcgtatgagttgtcagtgctatgcgatattgacttagcgctcatcatgttctcgccgtctggcaagctcacgcagtattgcaattgcagcattgaagaagtcatcgccagatttgccaatttgcccatgcacgagcggaacaagagttttgaggatatgttggcacgcttttcgaacaatcacatgcaccatgaccgcagcaaatacaataggaaggttgaaaacttggagcagctgcaaagggcgttgaaaaagctcgcagaagaacatggtcttgccgctagtcaagatcatttgtctggaagtaaatcaacgtatgaaatcgagttattgcaacaggagttaaagaaagcacaacaagagaaggaattggtgcaacagagagcaaggttgtacttggctgatgagcagcttttgcaaggtgttacctccgttccgcagcttgctaatatggaaagcgaattagagcaggcacttgagcgtgtgcgggcgagaaagaattatgtgagcagtgcttaccagaatgtaatacaacggcagcaacatgaatttcttgggaatagtttgcagatgatggcactgagacagcagcaatcgcagcaagcgcagcaacagcaggcaggcatgacaccatcacaggtaccatacatgcactggacgatgcaacaagagcgcccagaacctacaccccaagattttatggacagcaaacgaatccagctgctccactcaggcatgcatcgctcaacagagagccaggaagtaacggtgaatcaaatccaggtgtgggatatttcccatctggaccacaaccatcgaacatggaaacactgcggcaaattgggatggggggtgtcagtcgaggattgacaatgcacgagatgtcgctggaacagccgaatgtggcccagtacagtgaggagcagaaaaaagcgaaggttgaagccagcatgggctttgttacctcaaccagtgcgggtccggttggcgctgaagcagtgtcaaagactaatttttctcgagagcaacaacctgaacaggctcatggcaccgtcagcgcttcagagtggccgccacacccggcgaaccatcaccctcatgcgtacggtaacggcagtctattcttcagccagaatgaacaccatgcatggaagtaagttgcgtggacttgcaatctttttagctttagacacgtagttgaagaagcagcttcatatgggatacagacggctcatccaagtcaaaccacttcggtgtcaactactcagtcggctgtatcaatttgtggacaagagatgatatcagtgaactttcgagtgacgctcgtgggatcatgaatctgaccactggtggaagttttgtgatctaggcgctgtgctacgtagagcagctatcacccatgtgtgttcgttgtaccccacctntg

SEQ ID NO: 821 - DNA, 2292 bp, Physcomitrella patens
  misc_feature (1951)..(1951): n is a, c, g, or t
  misc_feature (2245)..(2245): n is a, c, g, or t
gatttcggacgttgaaggcacggattctgtagtgaagtggattgtagggatggtccagcgagcgtttgcgtggtcatgagaattacgtggagtgtgctgtgtgctggcactcacgtcaacgctgtctagttagaacccggcgcgtggttactaggttgcggaatctgcaattggatatcgagcggtggtcgcatgcttgggaggacgttttagtgggcagcgggtgccgagggagttaaggcgtagacacagggagccttcggtgttcaggaggtgggagaatttggaagggttgcacaattttatttatttatttatttatttttatatacaaattatcagggagaagagaacgggtttagcgagcggttgctgagatggggagggttaagctggagatcaagaagatagagaacccgaccaacagacaggtcacatactccaagcgacgcaatgggctcattaagaaagcttacgagctgtcagtgctgtgcgatattgatctggcgcttatcatgttctcgccttccggaaagctcactcagtattgcaattgcagcattgaagaagtcattgctcggtttgcaaatttgcctatgcacgagaggaataagagctttgaggatatgttgactcgcttcgcaaacaatcagatgcatcatgaccgcagcaagtacactaggaagatcgaaaatttggagtatctacacaaggcattgaaaaaacttgctggagagaaggatcttgtttcgaatcagcagctcttgtccgggagtaaatcaagttcttacgaggctgaggtgctgcaacaggagctgaagaaagcacaacaagaaaaagaattggtacaacaacgagcaaggctgtacttggccgatgaacaacttcttcagggcgtgacttctgttcagcagctggcgaatatggaaactgaattagagcaagcactagagcgagtacgggccagaaagaactacgtgagcagtgcttatcagactgcaaatgccctgcaacggcagcaacacgaatttcttggaaacagtctacagatgatggcattgcgacaacagcaacagcagcagcaacagcaagcgggtatgggaggaactccgtcattcttgcactggacgatgcaaccgagcgtccagagcccacccaggatttcatggagcagcaaacaaactcctcggcgtcactcatgcctgcaccgttcagtattcgggaaccaggggacaacgggggagcaaatccagcagcggcggcttatttccccgctggaccgcaaccgggagcattagaatcgcttcggcagatgggaatggcggccgccagccgtggattgaccatgcacgagatgtctttggagcagccgaatggccagtacatcgaggatcaacaaaagaaagccaaggtggaaggcagcatgggctttgctacctctagcagtgccgccgaagccgtctccgagaatactgtcacgcgtgatcatcaacaatctgagcagactgacgtcaatggcggtgctgcagattggcctccacatcccgcgaatcaccatccgaatgcattcacgaatggagggttgttctcaagttttagtcagaacggacaccatcctgcgtggaagtaataaacggtgggaggggcctaatttcacttagatggagaaggagctactcatggtccgaatttgagattcaactccggcaaaccgtgccagaaatctgtcaaggtgggtgcaagctaagtcatcaaccactgagctctcgggttagtgggaagctggtcatcatcgggctaagggttggtcactagaaacagtgtgagaaaaacgggcactatgtgctttgagcgcccgatgaccaaacgtgctctctgctctttctttcccccgcgtcctttcactgactccaccttccccgaagaatgctcatgtcaccacgccgagcanaaggttgacttggattctagcgttggcgtggagtgccggagatttttcacctcgtgtgcaattgtaatgagagaacgattcatctagttgactgtttctctgaatccgagacttgcatgtgatacatgacttggcccctgatgaggatgcctgaaccggagtcttggacctcggtgcagtgccatcagtggctcatgtatcatagttaggctgaccgtttttgaaacctagactcttccagactctcatcggtcgtggcagtcggcctggccttgtgtcatgttgcaacgtctntgaattgtactcgacaagcttatacttgaaaaccaacctcgtctcgt

SEQ ID NO: 822 - DNA, 1795 bp, Physcomitrella patens
  misc_feature (24)..(24): n is a, c, g, or t
  misc_feature (26)..(26): n is a, c, g, or t
  misc_feature (173)..(173): n is a, c, g, or t
  misc_feature (675)..(675): n is a, c, g, or t
  misc_feature (806)..(806): n is a, c, g, or t
  misc_feature (813)..(813): n is a, c, g, or t
  misc_feature (815)..(815): n is a, c, g, or t
  misc_feature (854)..(854): n is a, c, g, or t
  misc_feature (1646)..(1646): n is a, c, g, or t
  misc_feature (1683)..(1683): n is a, c, g, or t
  misc_feature (1716)..(1716): n is a, c, g, or t
caattagacctttaggggtggtananatgggtcgtgtgaagttggagattaagaagatcgagaacccgaccaacaggcaggtgacatactccaagcggcggaatggcctcgtcaagaaagcctacgagttgtctgtgctttgtgatatcgacctcgcgcttatcatgttttcnccatccgggaagctcacgcagtacagtaattgcagcatcgaagatattatcggtcgattcgccaatttacctatgcacgagcggaacaaaagaargcttgaaaatctcgagtatcttcacaaagcgcttaagaaactcgcaggtgacaaggaactggtctccaatcagctcatctctggaagtaagagctacgaagttgggttgctgcaagaagagctgaagaaatcacaacaagagaaagaattagttcaacaaagagccaggttgtacttggctgaccagcaactacttcaaagtgtcacttctgttcagcaactggctaatatggagacagaattggaacaagccattgagcgtgtgagggcaaggaaggcgtacgtgagcagtgcttacgaggcagcttctgtcatgcaaagacaggtgatggctttacaggtccgggctcagcagcagcaacaacaacaaggcttatcagggagtacacaccctccatttttacagnggaataatcctgagcgcggagaggcaatacttcaagactttatggagcagcaaacaaactctcagtcaatagttccagtgcagatgaacagggaaataggaagcagtaatgaagctggtccatcaaccttnttccctnanactggttctcaatctaacctgcacagtttagccggacanatgagtctcgtcggagttaatcgaggactaagcatccatgacatggctttggaacggtccagaggccagtacgaggatcgcaagaagtccaaaggcgaatccaacacgggcttcggagcttcgtcaagtagcagtggggctgccgcggatcaaggcaccggtgagaccttcaccggccaatctgagcctgcacatggaagcgcccccagcgccccgaactggcagctttcgcaccaagcacatcacgcgcaagcttattccgctgctcactatccaactggctacktcaatcagaacacagatacttggaagtagttccacgcgctgaggcggcttaccactgtaggctacagtctgtatagaagactaagctcagaggaattaaccacttagaaaggttgaccagtggtcatgcaacttgctcggtttctatgttggggtgattattgtagagggaagaatcattttcgagacgaaaacaaacgtgctatttgaaccgcatgttttctcgggagcaagtcttgagggatcaaacaacgcaggaagcacatgcacattgccgcgtcgaccgatggactgttcagcttttcgtcactggaacattataacgaacgccaacatgatgttcgtgactacgcagctacgaaggttcggcgtccaacagtttctcagcggagacacggccccacctcgtgcaaacaaaaacactcttggactgttcgtctgtgacgtataatatccagcttcttatacaaatgacgttcaggtaacttatagtgaggatacattccnccttaggactccaggccagctgcagcagtattcgtanactcaatggccaatttgcagtatattgcaaggnggacaagtatcaggttcwtgatacctatatacccgatgtattttggctccaacaagctggttaaataagaacgattctc

SEQ ID NO: 823 - DNA, 1713 bp, Physcomitrella patens
cagacttgggggcttcagttcagtctagcgcctgtggatgcgcaggcacgctggtccggtttgcctagatcattcctggaatggatcttgtgccttgtggcaagcgcccgcgggaacaagagaattcgccccgctgctacgaggaagggaacaatacctgattgaagaccgctgttcaccttggtgtgattggttactgttctgaaagcgcgaaacttttttgttttttttcgtgtctttttaggtgatctgaggcctagttgtgagattcggctcaggcttgcctgcaccttgtcctcttttgtctgcgcttgtctgtagcagggtcgaatccgtctgtgggaagaattcgatcgaaatttgggctctgaggaagcggagatgggcagggtaaagctagagattaagaagatcgagaattctgccaacaggcaagtgacgtactccaagaggcgtaatgggctcactaagaaggcctacgagttgtcagtgctctgtgatattgacctcgcacttatcatgttctcgccgtctgggaagctcacccagtacagcaattgcagtattgaagatatcatcgatcgctttgccaatttgcctacgcaagagcgaaacaaaaggaagattgaaaatctcgagtatttacaaaaggcgttgaggaagctaacaggagagaaggaatgggttcccaatcagatcatctctggaagtaagagcgaagaggttgagttgttgcaagaggagttgaagaagactcaacatgagaaggagttgattcaacaacgaatcagattatatttagcagatgagcagcttctgcagagtgtaacttcagttcagcaactagccaacatggagactgaactagaacaggcacttgagcgtgtgcggacaaggaaggcttatgtgacaagtgcttatcaggctgtttctgtgatgcaaagacagatgttggctttacaagcacagcaacaaaagcagcaacgagacaccttggggcaacaaccgttaccgttgcaatggaacaatcctgagtgcggccattcgatgcttcaagaatttatggatcagcatgcaaaccctcaagcaattgtcccagtgcagcatatgaacagggagatggggagcaacagcgaagcgagtccatcaagcttcttttcccagtctggctcccaatcaaacctacacaatttggctgggcagctaaacctcgtgggagctaaccgagggttgaacatccacgacatggccttggaacgctcaggcagtggccagtatgatgagcagaagaaatctaaaggtggggccaacgccggtttcgcttcttcaagtagcagtggtgctgccgctgaagggagtgccgagacgttcactggccaatctgagcccaacgcatccaactggcaactctcgcatcaagcccaccatcacatgcacgcatattccagtgcgcagtaccctactgggttctctaatcagaatgaagaggcttggaaatgattctgcccgttgatcaggaggctcggaggatatactattgcaagctctgaaatgagagggtgatgaatgatcaagggactcatgaaccgcatgaagctcatcaagaccttagacaatcctgttagaaagttactttagatggtcgacgtaacatgcatgccgattgttcagataataatttttactggtaaatgaggcgtgtaaaaattcttc

SEQ ID NO: 824 - DNA, 792 bp, Physcomitrella patens
  misc_feature (713)..(713): n is a, c, g, or t
attgttgattgaactggttcataatactgaacaaaaaaaaccttgtgagatcaaggtttggtggcaatagcaaaagctgtggtgggattaggagcacctcaaacagagcctcaaacagagcctcaaacagacatggataatttcggctatttcattagcggctgtatcgaatcaaaagctgaggccgtacagggtagttaatcaccaaattctctaagtacttattttagcgttaagctctagttggccactgagtgtaatgttattatccatacaatgtatttccatggtaacggttggtatagaaagtactcccgttatatttatgttgaaaatacctccgctagctcaggaaagtgattggaatttctggcaacatcaaccgcggtcaggccatctctgtctctggcattcacatccgccccagctttgaggaggagtttacatatttctgcatgtccccatcctgctgcaacgtggagagttgaacggtacatatttgcagctgacgggttggcttttaccaccttaatcaaaaatagtaccatctctaactgtcccctgctagcggcccaatatagggcagttgaacccttgcaatctttcgcttccacgtcaacacccttctcagcaagccaacaagctgccgtcacatgtccagctgatgcagcacaacgaagaggagtgcatccactagcgtcacgagcacttangtctgcaccccttgaatacagtaattccagacaacccacgtggccccctcttgctgcttccgtgtatgggttgcccacc

SEQ ID NO: 825 - DNA, 1174 bp, Oryza sativa; identical to SEQ ID NO: 428
  G3510

SEQ ID NO: 826 - protein, 226 aa, Oryza sativa
  G3510 polypeptide
MMGATSPSGLELTMAVPGLSSSGSEGAGCNNNNAGGGCNMRDLDINQPASGGEEEEFPGSVEEDEEERGVGGPHRPKKLRLSKEQSRLLEESFRLNHTLTPKQKEALAIKLKLRPRQVEWFQNRRARTKLKQTEMECEYLKRCFGSLTEENRRLQREVEELRAMRVAPPTVLSPHTRQLPASALTMCPRCERITAATGPPAVRPPPSSAAAAAPSPFHPRRPSAAF

SEQ ID NO: 827 - DNA, 813 bp, Zea mays
  G3650
ccacccgtgctcgatcgatcatgccatgtcaacgcccccggccgcgctgaccttgatccttctcgtctcaccgcaccttataaatacgcccacgtcgctcgtgtcgtcgtgtgctccatcgcaaacggccaaaaaccaccagcacaagtgcacaagccattgcccatcggacgcccagccggccagcccctgtcccgacggtcggccgacgacgatgagccgcgcagcgaccaacagcggcgcggagcggcggtgccggtacaggggcgtgcggcggcgggcctgggggaagtgggtgtcggagatccgggtgccgggcacgcgggagcggctgtggctgggatcctacgcggcgcccgaggccgccgccgtcgcgcacgacgccgccgcgtgcctcctccgcggctgcgcgggccgccgcctcaacttcccgggccgcgccgcctgctactacgcctgcggcgggcagcagccgctgtcgccgcgctccgtgcagcgcgtcgcgtccgacgccggcatggccgccgacgcgcagatcgtcgacgcgcgggcggccctcgcctcgccgccgcccgttgtccagcccgccgctctcgctggcattattggcggcgccgcgcgagaaggcggcggaggcgtgcgaggccccgcgtgcgcgccggcgccgccaagcaacggcgctggcagcagcagtacgtattggtccacgccgagcagtgagccgccgcttgtttacggggacattagcgtagacgacatagagatcttgatttgactattaggcactagttagtagcatagtcatggcagttc

SEQ ID NO: 828 - protein, 249 aa, Zea mays
  G3650 polypeptide
MSTPPAALTLILLVSPHLINTPTSLVSSCAPSQTAKNHQHKCTSHCPSDAQPASPCPDGRPTTMSRAATNSGAERRCRYRGVRRRAWGKWVSEIRVPGTRERLWLGSYAAPEAAAVAHDAAACLLRGCAGRRLNFPGRAACYYACGGQQPLSPRSVQRVASDAGMAADAQIVDARAALASPPPVVQPAALAGIIGGAAREGGGGVRGPACAPAPPSNGAGSSSTYWSTPSSEPPLVYGDISVDDIEILI

SEQ ID NO: 829 - DNA, 861 bp, Oryza sativa
  G3657
ccgagcactgcgcactgagcacctcgacacggcgcgcgcgcggccatggtgaagaacacgagcaacaagtgcattgctgctgccggcgcgacggcggcggccggcttaggcggtggcgcggcgtcgtgcagcggcggcggaggtgatgggaaggtgacgacggcggcggcagcggcgttggcggtgaggccgtacaagggggtgaggatgcggagctgggggtcgtgggtgtcggagatcagggcgccgcaccagaagcggcggatctggctgggctcctacgccacgccggaggccgcggcgcgcgcctacgacgccgcgctgctctgcctcaagggctccgacgccgtcctcaacttcccctcctccgcctcgtctcgccgccgcctcgacatccaccgggggggcacggactcggcggcgggcgacatgtcgccgaggtccatccagcgcgtcgcggccgccgcggcggcggcattcgacgccgccgccgccgccgtcgtcgtcgacgaaagctgctcgtgcagcgccgaggcgatgtcgtcgacgccgacgtcgggagcgacctcgctgtccacgctgggaagctccggcggcggtgacgtgctggaccacgcgacgacgccgtcgtcgtcgtcgtctgccgcggccaacgtttgctcgccgccgctggagggggaccatgagctgtggacggagctggacgcgttcgcgtcgccgaagttcatggatctaatggccgccggcggcacggcgttctcgtcgccgtgggaggagcccgaggaggacggcgagctgatgaggctgtggagcttctgctagcttagctaggagcctaggaaacgatcgtgaatccattct

SEQ ID NO: 830 - protein, 258 aa, Oryza sativa
  G3657 polypeptide
MVKNTSNKCIAAAGATAAAGLGGGAASCSGGGGDGKVTTAAAAALAVRPYKGVRMRSWGSWVSEIRAPHQKRRIWLGSYATPEAAARAYDAALLCLKGSDAVLNFPSSASSRRRLDIHRGGTDSAAGDMSPRSIQRVAAAAAAAFDAAAAAVVVDESCSCSAEAMSSTPTSGATSLSTLGSSGGGDVLDHATTPSSSSSAAANVCSPPLEGDHELWTELDAFASPKFMDLMAAGGTAFSSPWEEPEEDGELMRLWSFC

SEQ ID NO: 831 - DNA, 444 bp, Arabidopsis thaliana
  G3930
attttttttgtttctctcataatatttgtgttcatactgtttcgctgtttccagtacatactaatggataacacaaaccgtcttcgccgccttcactgtcataaacaacccaagttcactcatagctctcaagaagtgagtagtatgaaatgggagtttatcaatatgaccgaacaagaagaagatctcatctttagaatgtacagacttgttggcgacaggtgggatttaatagcaagaagagtggtgggacgtgaggcaaaggagatagagagatactggattatgagaaattgtgactatttctcccacaaatgacgcaaaagtcactctctttaaaaaatctcgagaatctccctgtttttctatttctcatcctcattaaataatttctgtgattgtggacaagaaaagctttattaagttgtcgagtggggttctcct

SEQ ID NO: 832 - protein, 84 aa, Arabidopsis thaliana
  G3930 polypeptide
MDNTNRLRRLHCHKQPKFTHSSQEVSSMKWEFINMTEQEEDLIFRMYRLVGDRWDLIARRVVGREAKEIERYWIMRNCDYFSHK

SEQ ID NO: 833 - DNA, 465 bp, Glycine max
  G4014
atgaggaagtgtgagctctgtaacagtcccgcgaagttgttctgcgaatcagatcaagccagcctctgttggaaatgcgatgctaaggttcacagtgcaaacttcctcgtcaccaaacatcccaggattcttctctgccatgtttgtcaatcactaacagcgtggcacggcacaggacccaagtttgtacccaccatgtcagtttgcaacacttgtgtcaacaacaatagtactgagacctgcagccaacagaatcatgaagacgatgatgatgatggtacgggagaggatcatgcagaaaacgacgatggtggtgtggctgaagatgatgatgatgatgatgatgaagaaaatcaagtggttccatggacatctacaccaccacccccagcttccacttcttcaaatagtgttacaactagttctaccaggttctctgatgttgaagaaggtggctccgattaa

SEQ ID NO: 834 - protein, 154 aa, Glycine max
  G4014 polypeptide
MRKCELCNSPAKLFCESDQASLCWKCDAKVHSANFLVTKHPRILLCHVCQSLTAWHGTGPKFVPTMSVCNTCVNNNSTETCSQQNHEDDDDDGTGEDHAENDDGGVAEDDDDDDDEENQVVPWTSTPPPPASTSSNSVTTSSTRFSDVEEGGSD

SEQ ID NO: 835 - DNA, 1236 bp, Glycine max
  G4015
atggaggaatcatcaacaacatgcgtgttgtgcgagaagagggcaatgatgctctgcgactcggaccaggctaagctatgctgggaatgcgacgagaaagtccacagcgccaatttcttggtcgcgaaacattctagggttcttttatgtcgtttgtgtcactccccgactccgtggaaggcttcggggatgaaactcacgcccactgtgtcgttttgtaaccgctgcgttgcggaacggaacgcgaggtggaaccgattggtgaataatgaaaatgaacatcaacaacagcaacaacaacaacaacagagtgattttgtggtggatgatgggagggaatatggttctgatcatgtttttgatgatgacgatggtgattatagtgatgatagtggtgaagaagaagaagaggacgaggatgatgaagaggagaatgagaatcaagtggttccaatgtcttctggttctgccacgtcaccacctaaggttgcctgtttagcgttgaagcgattgagaaacaactcttttctgtcgattcttcacatgatgagacagcgtgctcttcatctgagatgcttagttctacattgcctagtggtgatgaatcaccctctttgaatggaggaatcatcaacaacatgcgtgttgtgcgagaagagggcaatgatgctctgcgactcggaccaggctaagctatgctgggaatgcgacgagaaagtccacagcgccaatttcttggtcgcgaaacattctagggttcttttatgtcgtttgtgtcactccccgactccgtggaaggcttcggggatgaaactcacgcccactgtgtcgttttgtaaccgctgcgttgcggaacggaacgcgaggtggaaccgattggtgaataatgaaaatgaacatcaacaacagcaacaacaacaacaacagagtgattttgtggtggatgatgggagggaatatggttctgatcatgtttttgatgatgacgatggtgattatagtgatgatagtggtgaagaagaagaagaggacgaggatgatgaagaggagaatgagaatcaagtggttccaatgtcttctggttctgccacgtcaccacctaaggttgcctgtttagcgttgaagcgattgagaaacaactcttttctgtcgattcttcacatgatgagacagcgtgctcttcatctgagatgcttagttctacattgcctagtggtgatgaatcaccctctttga

SEQ ID NO: 836 - protein, 205 aa, Glycine max
  G4015 polypeptide
MEESSTTCVLCEKRAMMLCDSDQAKLCWECDEKVHSANFLVAKHSRVLLCRLCHSPTPWKASGMKLTPTVSFCNRCVAERNARWNRLVNNENEHQQQQQQQQQSDFVVDDGREYGSDHVFDDDDGDYSDDSGEEEEEDEDDEEENENQVVPMSSGSATSPPKVACLALKRLRNNSFLSILHMMRQRALHLRCLVLHCLVVMNHPL

SEQ ID NO: 837 - DNA, 666 bp, Glycine max
  G4016
atgaagaactgcgagttgtgcaagcttccggctcggactttctgcgagtcggaccaggctagcttatgctgggactgcgacgccaaggttcatggagccaacttcctcgtggaaagacacacgcgcacgctcctctgccacgcgtgccagtcgcccacgccgtggaaggcctccggcgccgccctcggaaacaccgtctcgctgtgcgagagatgcgccggcggaaccaccgaacaaggtcaagagagccaaggaggcaatgacgacgacatagacaccgacatagacaccgacgatgaggatgactacgatgagagcgaggacgaggttgccgccgacgaggaggacggagacaaccaggttgtcccttggtcctccgagccgccgccaccagccccgagctcttccagcagcgaagagtcggttagccggtgcaacaacgtggacgaggtttcgaccacattgaaacgccgtcgccaggaggacaatgattttcagggttggaattcgaataattggggatgtgaacggagcgaagtggagagaggaggttggttggttcggttgcggcggagaaccgccgatgatgtggcggttgagcaacggagtgctagagcggcgtctccagacggttgctgtggtgatagagcatctgaagacgtttga

SEQ ID NO: 838 - protein, 221 aa, Glycine max
  G4016 polypeptide
MKNCELCKLPARTFCESDQASLCWDCDAKVHGANFLVERHTRTLLCHACQSPTPWKASGAALGNTVSLCERCAGGTTEQGQESQGGNDDDIDTDIDTDDEDDYDESEDEVAADEEDGDNQVVPWSSEPPPPAPSSSSSEESVSRCNNVDEVSTTLKRRRQEDNDFQGWNSNNWGCERSEVERGGWLVRLRRRTADDVAVEQRSARAASPDGCCGDRASEDV

SEQ ID NO: 839 - DNA, 574 bp, cauliflower mosaic virus
  CaMV 35S promoter
gcggattccattgcccagctatctgtcactttattgtgaagatagtgaaaaagaaggtggctcctacaaatgccatcattgcgataaaggaaaggccatcgttgaagatgcctctgccgacagtggtcccaaagatggacccccacccacgaggagcatcgtggaaaaagaagacgttccaaccacgtcttcaaagcaagtggattgatgtgatggtccgattgagacttttcaacaaagggtaatatccggaaacctcctcggattccattgcccagctatctgtcactttattgtgaagatagtggaaaaggaaggtggctcctacaaatgccatcattgcgataaaggaaaggccatcgttgaagatgcctctgccgacagtggtcccaaagatggacccccacccacgaggagcatcgtggaaaaagaagacgttccaaccacgtcttcaaagcaagtggattgatgtgatatctccactgacgtaagggatgacgcacaatcccactatccttcgcaagacccttcctctatataaggaagttcatttcatttggagaggacacgctga

SEQ ID NO: 840 - DNA, 4361 bp, Arabidopsis thaliana
  STM (Shoot Meristemless) promoter
agaatgtagcaatacaaatatatgacggtaccgttatccatcaccattatatgtatatatgtataatttgataaatattcactttgtgtttcgtcgtttgcttaataaacagctcatttccatggtattgagtcttctatatgcgagagaatcagattcccgctgggataacaaaagaacaaggtactgaaaaaaatagacaaaacttttttttaaattatataagctataaaagaaaagagtatagagagagattagccctactgtttaagagggagagagtagggtcattagggctttagagagagaagacattcggactgtccccacttgcttttctgtagaataacattatttaaatcttatttttaattaaatattacaactaaaagaagaaaccaacttttaaaataaatgcagattatatgctctgacttggactaaataaaacttgcaagtaacagtttcaagtccttttgttttagaactttttctttcgtagaagtgataaatgattgccctagacctgatagattctctaaaattctacgtattacagcataagttacctcctttatttgactattagaccatccatattggtgggcttttagcaaatgttcttaacaataattttataatttattttaatgttaagaggtttgataattttttttttttaagagtgtattttgtttattaaaatgtgttttgtttcttatataagaaccaaatcttaactattttaccaattaaacattaaatttaaattttaatatctctaagaattatattaagagccaatatagatgcttttaaaaccattggttgaataaataaatctaaccttcttaattatttctgtgtgaatattttctaaattttcattttaatttagcacaatataatccatgttctaaaaagaacaattaacataatatttacaaacctaaaaagattataaaacacaattttattttttacagcttataatgttttaaagttcaggtttattttttaaaagttcaggtttattacattaggtttgacttgtaatcatcatttatcacaacgatcaaactattattacaatcacaatagtagacaaaatttaggatatatatatatatatataattatgtataaactatgaacatttaaagtgagatttttcaaaataatatataaattcaaatagaaatagactatttggttcttaaatgagagacccccgaaaaaatctttttttttttctcatcaagctgtttacatttttagatataaaatcatattctttatagtttagaatatgaattaaatagttttatatgttattaacttatcataagatatgcgtgaggttggccaaaaactcatcaattaaccaaataagaaaagtaaaattgtattttgctttgctaaaaatgtaaatatttcattgaaaaatgaaaaaggtttaggtaatacaattaagtaaatcctacaattttggttccatggcaaaagaataaaattgtattgctttggtaaaagttgatccaactaatatattcagtagaaactgcaaaactgaagaaataagtttgtttagtagaattgctttcggttatgtaatgaatatacatccaaaatggctttttagtaatgatgtcttttcatactctttccaatccctactactttcagattatttgtcctactattatagagatatacgttcgttttcaataatatgaaaagtgatatatatttaaatagtgtgatatatatataagttttgcaagtgcatcacttcccaaaatcgcataaatcattaatcatattgtcgaaaacagtataataacttcttaaacgaaaacgcagcgcaattaaaaataacaactagagataattgacaaaacattgattaatatttacctataagttaattattgtatttaaaatttatttaaagttcataaggaaaacatatgcaaaaatatttatatctaatattttgctatgttatccttttttttttttacgttatcctaattttgtttatcctaatttgttgtggttaaaatcttattattgataaaaagagaacttttttttttgtcatcataaaaaagagaacttattacttcgattttaaaattctatgagcgtaggagacaaagaaaaaaaaaataaaaaaaaaaagaagagaaaaatcacttcttttcttctttttagtccagatccaacatattttggataactaaatgaagattttttaaaaaaatatattttagggtatatataaatcataatttgaagcaaatgaaataaaatccagtttggtaatatataaatatgatttgatgggttccttgtaatctctctctatctattagtttctcagttatcttttctttgccagaaatggcagtgaaggcagtggctgaggagagagttttttttcttctttcatggggaaagtaaaactttgccttgaagatttctctcttcaatatttttctaagacttttgatttcaacgaatcactgtccttaacctaaaagcaagaaaaattagctttatactggtctttacttttttttaacatatttatttttatatagtttacttataaacatagacatacgagtatgggaatatatagtatatccaacttctaaataatatttcgaatagtgataacaaaattagcaatacatacggctagtgaaatgttgatcgaataaacggcactgatgtaatgtacttatcaattttgataattttaattgtattgtttttctttttttcccacagtattgaactagacaattaaatttaaagtaaaattatacatttctttcgttgtgtattaaagtaacatgcataatatcattttccttcgtacaatcctccaaattgacaattgatgaattactttgtcaatcgtaaatgaatttttctcaagtctgtatactattttcagggataaacaggtacaggtgtcccatgcttattctcttgatagtaacatgtgtcctatgttgagtcaattctacgttcgaagaagtgctaacaattgttaatagcctcgtatattattctaattaaaatgcctcgatagatttggttagtggtctgaatgtgattggttattttttcaagtggcaagaggtctaccatctaatattacaatcaatcgaccaaaaaggtcgagaacatgataatggtggcaaatacaaatggttcattgttgtctaatataacaagccatcagttgtcactttttaaaaacaatacagaatacaagatactttttttttaaggtaaaatgtgtgtttaatattttcgtttatataacaaataaacagttacatgttttactctatgattatatttatgacatttttcttcttcttaacaacatttttttcccataagaacatttacaatagtattaaaactttgattgcaatcaaatgttagatcacttattataaaattactaagactgctatcttttcctattgacaaaagcgaatccaatatatgttactgaaacaaatgcgtaaattatactatatggagatctatcggttaattattgagagaatctaagaaagtttttgagtacaacagtcctaataatatcttcacataccatataatatacatatatacatatacacaaatgtactttttaaaccaacatcagcatacgtatatcccatcaggaaacttagacttttgggaattcatggtatgaaaaccaaaaccaaatgacaacattcgatttgatactcccgacccatggtaaagaaataacaaattccaatatatctttcactggactttccgaggcacattccggttttctccatttcaagaaattgtcaaaaataaattgagatccggtttattacctcaaaaaagaagaagagaaattacaacattaatttccgaaaaggcataaatgagaaatcatatttcagcagaagaacacaaaagagttaagaacccacagatcacacaacctctgtccatgtctgctttttacacttttttaaaataagtttctcctaaaaagttatttcctatttataataatttccttagatttatcttcctggtctctcttctgctgcttccctctcccccataactatcactatttagaattttcaatgtggaaaaggaagctgattgttgaagcataaatcccgggagaccacttttgcattttcaaataattaaattaaaccatagatacacacacacagttacttactcttttagggtttcccaataaatttatagtactttaatgtgtttcatgatattgatgataaatgctagctgtatttacaatgggggctcct

SEQ ID NO: 841 - DNA, 4801 bp, Arabidopsis thaliana
  AS1 (ASYMMETRIC LEAVES 1) promoter
ggaccgtgtaatgggccattgggccaagttttcttgatataaaatctgaaatactactaaattacaatttttcttaaactcgatttcataattcatgtgggactcagttctccgcgtcttatgacttaagagttaagagtaaagacaattgattgtagtttgcattattaaggttgtgattttaaaggctatattggcccaggcaaagtggttatgaaagttaaaaggtattattaaatgtcgttatggactagctaaagaaaagagatggatatagaaacggatttgccagtttgtgaggttacgtactcgttactttctattgcatttttgtgtgtcattgtgcttgtgatttctttagtatatgtttttctttttgtcaaactctttagtacatgttatgctttattttcttgtttagcattgttattgttattttgatccatgttcttttacttaatgtgtagagtgttcacgtacgactctttatgatcgctatactaatatactatgaaactcgaatgagaacatgcatgtcataaatcaataaaacataacatacgacacttaacctaaatcatacattcattgattcatactatcatgatcctcatcacattagtatcatttgtctttatttattacttagctacttcgttatcttattatatctttacctgttctgctggtcatttgccataaacaccaagtacaagcaactctttagtccaatatcagaccaaattaacaaacatttccccaatccaaaacggaaatttaattataattagcatttaaataggttcgattacaaaaaaaaatcaacaaaggaacaagtcaatttcataatggtttgtcaattgtcacacaacgaaatggctagccggatcaagcatgcatgatccaaatttcaacatttccatgataacctgaattataacgtctacataaaccatatttaaataaataggatggtcgaaagatatcattaaaagaacgattcaatattctttattgttcaattgatacacatgttattctccttaaccagttatgaacatgtcctacaagtttcttgacccaaactcataatttcatataccataatcccaagttaagttttttttttttggggatcaaaatctcaagttaagttaagttcaattatttagctgtaatgctcggaaaaaagatcggatgaatatccaattggttcaatatataccccaatccggccaatctccctatctttatagcttaattattagagaatggtcaattcacgccatcagaaccagtttcatatcttcatgaaccaaaacgcctacaaccctattattcaagaaatcactataattgtccaagtaaaaccattaattaaccgagtcgatttttctatggtcctataggcatgttgttactcaaactactgattaattaataagaagttgtagtttgaaaaagaatctagctgaaaaatactcctactctaagaatttaagttagaataaaacatattaatacaaatataaaaatttagttattaaaaaagcgctactaccaagacgtcctaaagaaaaactagctttgtcttctaaaagaaaacctagcttaactacccaaaaaaatctagttttacaaacactaaagacaaattttatttttcaacaaatttaccaattaaagaaaattccatgtaggaatgtatccaaattgaaaatatccctacatattttgtaggaaaaaaggtttttataaatattaaaaaaacgagaaaaagaaaagagaaaagagaaaaaaaaaagccggagagaatggagcacatgaggtaaaaggcaagagatggcagagagaagatcagagaagggatctgcctcaatttgacaactcatatgtcatgtcatttccctcactactattattttcctatttcaaaaacacctttctctgataccatcaccttttaccttctctttttttttactgtctttgctctgtttcacattcccttctatatatacagtatagtatattttatccttcttttattgttttgcttactaaaagtttttttcctccggaatcaaaattctaaaatgtatatcatgttaggtcgcgagggccatgcaatattatgaactatgcatgatgattaatgtctgtggatccatcacaaatattattgaaggttgatcagagactatggaccaaaatggtccgaatcgcctgataataaaaaactattcatttttattttttattttttttattaaacatgtgattaatgatagatcttacgattcgcaactgggaaacatgcactaactcaaacttaaaacacacaatactaaaagttctattaaattttgaatgtaaagagaaatatattaggcaatcaaacggtcaagtaaatcatacacatcgataatttatttttttatccttcaaagcaggcccatccaaggcccaccactattctcatatcaacatacttttcttgttttggttaaatcaacctaccatgttggctgttctctccgctcctctgtgtaagatcacaccaacaccactgcataatttcttgtattattttgagacttgagagtaaactgattgacaaaaaaaaaaaaaaaaaaaaaaaattgagagtaaactagtttcttgaatattgattttttcagcttaatttgttggggaaagatattactactattgctgtaaaaaaaaaaaaaaaaaaaaaagatattattactatatttgtagtgattttattttgaaaattctcttcacttttttgtagttaacattctaattttgtgaaaagaacttttaatgtcaggtcatgtctcttaaaaagtttgcatgatgaaatgatttacaaattacaatagaaaatggaaaccattgcaaactaaatttttatcaaaaaaaatcgaaaataaaatgtattgacttagtaatgctgtgtctgctacgattaactattacacataatgcaacactgaattatccaaatacattattagaataatagtattacagtatcactattacaacaacaatgtcaacaataatcttattataataatatataaatagaccttagtgacatcatattatatagaaaacatgtggttgcctaatttgtataagctagatacttgggggtgatgagtgactagttgatgcaatgataaaagagtgaaagttttgtctgcctgattatagacgtcggagaaatactaaaatacgctatgaagattttggcgcatggtagcagaaaaaaaaaacggagggtgtgagtgagtagtggtagtcggatgtgatggaacaaagaaaagtatttttggtagggttatgggagagagaaggggaccattattacacacttacatgctttccccaaaagataccattcccattttctgacacgtgtccccctcatccccaattactcatacgtcaaatccaatttttagcctaaaagttttttttatttgtttagccaaatctattttactaattaaagttttcaaatggcaaatagaaagatcttctaaggttttataaaattacttgattatttctagttttgctcattttttaaataaaatttctcttttttttcttgcaacattattgattttttttttgatagggagtaacattagtgatgttctatctcttctcattgcaaaaactttattttctcatctctatttgatcatcattgcgaaatcttccattttcaacaaatacttttccatgttaatatgctgtttcaaaatataagtgtttggaaaataaatcaacaagtttaaatgttaactatttttatgctattataattatttttcttatgggtaagtggaaattaatgttactcaaattggacataaaattctattgtttgagtgaaggagtttataaatggagcattattttcttgaatggttagtttttcttctatcattttgacaagtaaatgacttttcagccactaaagtacaacactttttcatttaaatttaaagcatcccctacattagattgtcattttatttctcataatgttatagaaaaatgaattttgagatcccaatgtagtaaatatatataaaaaaaggtttaatattgtcaatgacaaacaacgaacttatggaatttcaacttttcacctccacgcgcctctgtcagagttttttttttccccacttgtgatgtaaaaaggggaaaacgtctgtgtctcagtcggtaaactttttctctctttttttttttaaagattttattttaattatgccgtctctgtggtctaatcgtgtacgtcgtctggttttaaaagcctctctcactttggtcttttcgttttctctcttccattttctccaactatataaaaaaaaaaaagtgagagagagagcaaatctgtgtgatggaagttgctcttgagtttgggattatttatcttttcaatatcatttggtaagcatttttattttgttttatagtaataattttaactctcttatcttcttaataagtctttgcttaatagtgttttggggtcagcattaatttcccctgtttggtttccagaatataggttgtatagtgtgataataacaaattattccaagttttgcttcaaacattgtcaaagtttttgtcattttcatttcttgaaacggaaatttttcagactttgtaatttctaattcgaaaattcgacagatcttgtagatttgtttcgatcttttagagttttgaattggagagatttatgaaacgggttgatttt

SEQ ID NO: 842 - DNA, 1183 bp, Arabidopsis thaliana
  LTP1 (Lipid Transfer Protein 1) promoter
gatatgaccaaaatgattaacttgcattacagttgggaagtatcaagtaaacaacattttgtttttgtttgatatcgggaatctcaaaaccaaagtccacactagtttttggactatataatgataaaagtcagatatctactaatactagttgatcagtatattcgaaaacatgactttccaaatgtaagttatttactttttttttgctattataattaagatcaataaaaatgtctaagttttaaatctttatcattatatccaaacaatcataatcttattgttaatctctcatcaacacacagtttttaaaataaattaattaccctttgcatgataccgaagagaaacgaattcgttcaaataattttataacaggaaataaaatagataaccgaaataaacgatagaatgatttcttagtactaactcttaacaacagttttatttaaatgacttttgtaaaaaaaacaaagttaacttatacacgtacacgtgtcgaaaatattattgacaatggatagcatgattcttattagagtcatgtaaaagataaacacatgcaaatatatatatgaataatatgttgttaagataaactagacgattagaatatatagcacatctatagtttgtaaaataactatttctcaactagacttaagtcttcgaaatacataaataaacaaaactataaaaattcagaaaaaaacatgagagtacgttagtaaaatgtatttttttggtaaaataatcacttttcatcaggtcttttgtaaagcagttttcatgttagataaacgagattttaattttttttaaaaaaagaagtaaactaactatgttcctatctacacacctataattttgaacaattacaaaacaacaatgaaatgcaaagaagacgtagggcactgtcacactacaatacgattaataaatgtattttggtcgaattaataactttccatacgataaagttgaattaacatgtcaaacaaaagagatgagtggtcctatacatagttaggaattaggaacctctaaattaaatgagtacaaccaccaactactccttccctctataatctatcgcattcacaccacataacatatacgtacctactctatataacactcactccccaaactctcttcatcatccatcactacacacatc

SEQ ID NO: 843 - DNA, 1009 bp, Lycopersicon esculentum
  RBCS3 (Ribulose 1,5-bisphosphate carboxylase, small subunit 3) promoter
aaatggagtaatatggataatcaacgcaactatatagagaaaaaataatagcgctaccatatacgaaaaatagtaaaaaattataataatgattcagaataaattattaataactaaaaagcgtaaagaaataaattagagaataagtgatacaaaattggatgttaatggatacttcttataattgcttaaaaggaatacaagatgggaaataatgtgttattattattgatgtataaagaatttgtacaatttttgtatcaataaagttccaaaaataatctttaaaaaataaaagtacccttttatgaactttttatcaaataaatgaaatccaatattagcaaaacattgatattattactaaatatttgttaaattaaaaaatatgtcattttattttttaacagatattttttaaagtaaatgttataaattacgaaaaagggattaatgagtatcaaaacagcctaaatgggaggagacaataacagaaatttgctgtagtaaggtggcttaagtcatcatttaatttgatattataaaaattctaattagtttatagtctttcttttcctcttttgtttgtcttgtatgctaaaaaaggtatattatatctataaattatgtagcataatgaccacatctggcatcatctttacacaattcacctaaatatctcaagcgaagttttgccaaaactgaagaaaagatttgaacaacctatcaagtaacaaaaatcccaaacaatatagtcatctatattaaatcttttcaattgaagaaattgtcaaagacacatacctctatgagttttttcatcaatttttttttcttttttaaactgtatttttaaaaaaatattgaataaaacatgtcctattcattagtttgggaactttaagataaggagtgtgtaatttcagaggctattaattttgaaatgtcaagagccacataatccaatggttatggttgctcttagatgaggttattgctttaggtgaaa

SEQ ID NO: 844 - DNA, 922 bp, Lycopersicon esculentum
  RS1 (Root System Inducible 1) promoter
caatcaactaaatggacttttcttgtgcattggtcccatttttacgccctaatattcgcttacttgcttttttgtattttatttattttagttttaattttatctacctccaaattgatagaaataattacacttatagtccttttgaaaaattataattatagcattcaagtaaataaaaatacgtatttttagtcactttgtaatgtataattttgagttgaaaatgtatcaaaagtaaatttatattcttaagatatggataaagtttacatatacattatccgtttcataccctatttatagtattacattgcataagttattgtagatcttgatcgaaagtatgtgatattaatactatttttagaattatgttattctcagttatggagtgatatttaaaatcaatatagtatatcgataatcagatagtttaattcttattttctccatccaatttatataatgatattataatcaattttacgaatgagatggatattttgaaatttttagtttaaaataaattttaaattttttgtgggtctataaattatctaattaagaggtaaaatagaaagtttgaaattaattattacttactaaatatataaatatgtcattttttcttaaactgatttagaagaaaagagtgtcatatacatggacagaacgaatataatttgataattaaatttgtaaagattcatagttaatagggatcaaaattgcacgtatccattactataaggtcatatttgcttcataaaaatcatcaggatcaaaaatcagaatttatattatatttgagggactaaaaatgctaatatcacaaattaaaattagtctataaatattcacactttactcttctaattccatcaaatatttccatttatcttctcttcttcttaaatat

SEQ ID NO: 845 - DNA, 3446 bp, Arabidopsis thaliana
  AP1 (Apetala) promoter
cacggaccttggatctgaagttatgaacaataacatatttggcaaaacaaagaaaaaagaaacaacaatactaacatattttggtaaaagaacattgagaagtctcaaaaattaacttcttcttattttgtttcctaataagaccgtttgcttcatttcaagttcttaggaaataatttcatgtaacgtgtatgtagatatgtttatgtacagataaagagagatctgaaaatgatatatagagcttttgtggtgataagtgcaacaagcaggatatatatatcgaacgtggtggttagaagatagcgtcaaaatagatgctagctgctgcgtatacatcatattcatatcatatgtacttctcttttgtgatttctcatgtgattgaacatactacataaatcttgatagatttataaaaatgcaacaaattgttgtttatataagaaaaataaaacactgatatgatatttcattagttattatcaaatttgcaatataatgtttaacatccaagatttgttttacataatcgttacggttactaaagtttaatttatgatgttttaaaacaaattgagactaaatttctaaaagaaacatatacgtacatgtgtgtagctgcgtatatatatagaatggtggggctaaaagctaatgatgtgtacattaattggacatttgatgtggctggattggacccaacttgctctttgatagagacctaactaagacaattttgctcttcattcatttctcccgtatacataattgaattaactgtacataatgtttcacaacaagcgatctagctatatatttcaaaataacagagactgatattttaatctggtcttctaagctctaacgtcaaattaaaaaaaaaatccgatcttctaattaattagaagaaatcaattatagaacctctctctttaatttcatttatttaaaactgcttggaaatttaattattcactaaagactcactattctccttaatttatgataatttgtagatcatatgttcagtttttatttatttgccattcgaatgttgagttttaattaaaccaatatgttaatattcgaattaaaaaaacttacctataattcacttatttaaaaacataaaataataataattgcatcaccgtgatacaaagcaacctcacaagtcacaactctcgtgactacaaagatcactcattaaacaaaccttcctgccttctttttttctacttgggcacctcgaccgatcgaagactattcttgggatctgcttcaaaaacgactatatgttctaaatccacttcgtatgatgacgaacatttggtttactactgaagatagagattacgtccttctaattagaagtaattaattattttagtatttggaagctaatggtggagatgtaaccgtatcttagtggatcgagatattgtatataaaatatgtatgctacatcgaataataaactgaaagagagtaaaaagggatatttaatgggaagaaaagaagggtggagatgtaacaaaggcgaagataatggatattcttgggatgttgtcttcaaggccacgagcttagattcttttagttttgctcaatttgttaagtttctacttttccttttgttgcttactacttttgctcatgatctccatatacatatcatacatatatatagtatactatctttagactgatttctctatacactatcttttaacttatgtatcgtttcaaaactcaggacgtacatgtttaaatttggttatataaccacgaccatttcaagtatatatgtcataccataccagatttaatataacttctatgaagaaaatacataaagttggattaaaatgcaagtgacatctttttagcataggttcatttggcatagaagaaatatataactaaaaatgaactttaacttaaatagattttactatattacaattttttctttttacatggtctaatttatttttctaaaattagtataattgttgttttgatgaaacaataataccgtaagcaatagttgctaaaagatgtccaaatatttataaattacaaagtaaatcaaataaggaagaagacacgtggaaaacaccaaataagagaagaaatggaaaaaacagaaagaaattttttaacaagaaaaatcaattagtcctcaaacctgagatatttaaagtaatcaactaaaacaggaacacttgactaacaaagaaatttgaaacgtggtccaactttcacttaattatattgttttctctaaggcttatgcaatatatgccttaagcaaatgccgaatctgttttttttttttttgttattggatattgactgaaaataaggggttttttcacacttgaagatctcaaaagagaaaactattacaacggaaattcattgtaaaagaagtgattaagcaaattgagcaaaggtttttatgtggtttatttcattatatgattgacatcaaattgtatatatatggttgttttatttaacaatatatatggatataacgtacaaactaaatatgtttgattgacgaaaaaaaatatatgtatgtttgattaacaacatagcacatattcaactgatttttgtcctgatcatctacaacttaataagaacacacaacattgaacaaatctttgacaaaatactatttttgggtttgaaattttgaatacttacaattattcttctcgatcttcctctctttccttaaatcctgcgtacaaatccgtcgacgcaatacattacacagttgtcaattggttctcagctctaccaaaaacatctattgccaaaagaaaggtctatttgtacttcactgttacagctgagaacattaaatataataagcaaatttgataaaacaaagggttctcaccttattccaaaagaatagtgtaaaatagggtaatagagaaatgttaataaaaggaaattaaaaatagatattttggttggttcagattttgtttcgtagatctacagggaaatctccgccgtcaatgcaaagcgaaggtgacacttggggaaggaccagtggtccgtacaatgttacttacccatttctcttcacgagacgtcgataatcaaattgtttattttcatatttttaagtccgcagttttattaaaaaatcatggacccgacattagtacgagatataccaatgagaagtcgacacgcaaatcctaaagaaaccactgtggtttttgcaaacaagagaaaccagctttagcttttccctaaaaccactcttacccaaatctctccataaataaagatcccgagactcaaacacaagtctttttataaaggaaagaaagaaaaactttcctaattggttcataccaaagtctgagctcttctttatatctctcttgtagtttcttattgggggtctttgt

SEQ ID NO: 846 - DNA, 1326 bp, Lycopersicon esculentum
  PG (Polygalacturonase) promoter
accaatgcgctatatattaatcaacttgataatataaaaaaaatttcaattcgaaaagggcctaaaatattctcaaagtattcgaaatggtacaaaactaccatccgtccacctattgactccaaaataaaattattatccacctttgagtttaaaattgactacttatataacaattctaaatttaaactattttaatacttttaaaaatacatggcgttcaaatatttaatataatttaatttatgaatatcatttataaaccaaccaactaccaactcattaatcattaaatcccacccaaattctactatcaaaattgtcctaaacactactaaaacaagacgaaattgttcgagtccgaatcgaagcaccaatctaatttaggttgagccgcatatttaggaggacactttcaatagtatttttttcaagcatgaatttgaaatttaagattaatggtaaagaagtagtacatcccgaattaattcatgccttttttaaatataattatataaatatttatgatttgttttaaatattaaaacttgaatatattatttttttaaaaattatctattaagtaccatcacataattgagacgaaggaataattaagatgaacatagtgtttaattagtaatggatgggtagtaaatttatttataaattatatcaataagttaaattataacaaatatttgagcgccatgtattttaaaaaatattaaatagtttgaatttaaaaccgttagataaatggtcaattttgaacccaaaagtggatgagaagggtattttagagccaatagggggatgagaaggatattttgaagccaatatgtgatggatgaaggataattttgtatcatttctaatactttaaagatattttaggtcattttcccttctttagtttatagactatagtgttagttcatcgaatatcatctattatttccgtcttaaattattttttattttataaattttttaaaaataaattattttttccatttaactttgattgtaattaatttttaaaaattaccaacatataaataaaattaatatttaacaaagaattgtaacataatatttttttaattattcaaaataaatatttttaaacatcatataaaagaaatacgacaaaaaaattgagacgggagaagacaagccagacaaaaatgtccaagaaactctttcgtctaaatatctctcatccaaactaatataatacccattataattaaccatattgaccaactcaaaccccttaaaatctataaatagacaaacccttcccatacctcttatcataaa

SEQ ID NO: 847 - DNA, 1242 bp, Lycopersicon esculentum
  PD (Phytoene Desaturase) promoter
acgtgtaatagctaccatacaagagaagtaactcgcactgtccatgtcttatgtggctcgactcagaaagcattcagggggattgataaccaccctccaaaccaactgaaccattgtgaataaccacccttcaaatcaaccgagtcctcgtgaaggacaaatatgtggttttatatacattaaattttgtttttacatgcttcctcttacttctttagttttcttgaccatatcttgcgtttttcccttctgtaattgacacttttcttcaaaccatccagcaatgtggaagcttgacgattttccttcagagtagaaattgaaaagaatcaactaaaaaggatagtccttcgatttgatttccggcttaaaaataaactaataagaatgagagagcgaataatagaatattttgaaattttaaagatattcaactatgttaaattgcgttataaatttcttaaattagtagcacctaatagtttagttctcaaaagtcaaaactactacataatgtgctcatttttcacattaaaatgcctacatgatgtaaaagtaaaactcgtagcattctacgtgttttactcaactcaaacatcctgttcattttaataaacgtacgatgagcttctctctccaattttcttttcttttttttttttaaaaaaatatttttttttatatcaatccaaatgggctccaatttatcataaattaggtagaaacttagatattaaagaaagaaaagggtttatctcgcaagtgtggctatggtgggacgtgtcaaattttggattgtagccaaacatgagatttgatttaaagggaattggccaaatcaccgaaagcaggcatcttcatcataaattagtttgtttatttatacagaattatacgcttttactagttatagcattcggtatctttttctgggtaactgccaaaccaccacaaatttcaagtttccatttaactcttcaacttcaacccaaccaaatttatttgcttaattgtgcagaaccactccctatatcttctaggtgctttcattcgttccgaggtaagaaaagatttttgtttctttgaatgctttatgccactcgtttaacttctgaggtttgtggatcttttaggcgactttttttttttttgtatgtaaaatttgtttcataaatgcttctcaacataaatcttgacaaagagaaggaattttaccaagtatttaggttcagaaatggataa

SEQ ID NO: 848 - DNA, 1109 bp, Brassica napus
  CRU (Cruciferin) promoter
ctacacgttttgaaaagttaacctgttggttaaatggttagctatgactctcgcaacaaacccaacccttaagatgatgatggtttaacatttgacaacatagttaagactgtgtctatataatagtcaacaaattcagattgtagtattatggagtcaacatatttcgagatcaaaaacattcaaaacgtaaatctatcgacgtctcacatagttttgttatgaagctgatgaaaaaagttggaagacatagttttgcaaacatcatttgttgctaacgtataaacgttggtttgattaaatgtaataggataaggatatccgtttgttcatataattgagttaaattatattttggttattataatatgttaagttgaaaataaataggtccaacaaccttgtttaaatagattttttaggagtgattcccttttaatagtatagattatactctcttcctaatcgaccttccgtggggtaaagtggtcaattatattctttatggatgagcttgattgagaatgggtttatgggttatgacaagggcatgtacaaatgtcactgcctcttgacatgcaaccgaacagttggcgactcaagtcgcagaagatacaacggaccaaaccctccgagtgtcgccgcgtctgttatgtgtcacctttttgtctcctttccttaaaaattggtaactcatttttcaaaaaaagaagaggatagttttggctgtatctcctaaactattcgatcacaacgccagatattttaatactggatactagtgatgtaatttgatttgttaattgtcaaaaagtagattctcctatctcgtttttagttcaattattatatggttaaatgaatttaagtcgattagaaatgattagttaatcaaccagagttgctctataagtctatactgataacatgaaccattttctaaaaatgagatagatacatttgaattttgtcgtggtttggagtatgcggagatagtcgtacgcgcatgaacatcatgagacacttgcttcagctcacagagtgacgtgtaaagaccatagacccacgacttcatgcaaacccattcctacgtggcacaaaccttcatg

SEQ ID NO: 849 - DNA, 55 bp, cauliflower mosaic virus
  35S minimal promoter
cgcaagacccttcctctatataaggaagttcatttcatttggagaggacacgctc

SEQ ID NO: 850 - DNA, 66 bp, tobacco mosaic virus
  omega enhancer (in 5-utr of LexAGal4 ORF)
atttttacaacaattaccaacaacaacaaacaacaaacaacattacaattacatttacaattacca

What is claimed is:

1. A transgenic plant having an altered trait compared to a wild-type plant of the same species, wherein the transgenic plant comprises:
a recombinant polynucleotide having a nucleotide sequence encoding a polypeptide having a conserved domain with at least 80% sequence identity to a conserved domain of amino acid coordinates 135-195 of SEQ ID NO: 84; and
wherein the altered trait is selected from the group consisting of increased levels of leaf chlorophylls, increased levels of leaf carotenoids, increased volume, and increased biomass.

2. The transgenic plant of claim 1, wherein the transgenic plant has greater vegetative yield than the wild-type plant.

3. The transgenic plant of claim 1, wherein the polypeptide has a conserved domain with at least 85% sequence identity to the conserved domain of amino acid coordinates 135-195 of SEQ ID NO: 84.

4. The transgenic plant of claim 1, wherein the polypeptide has a conserved domain with at least 88% sequence identity to the conserved domain of amino acid coordinates 135-195 of SEQ ID NO: 84.

5. The transgenic plant of claim 1, further comprising a constitutive, inducible, or tissue-specific promoter operably linked to said nucleotide sequence.

6. The transgenic plant of claim 5, wherein the constitutive, inducible, or tissue-specific promoter is a LIPID TRANSFER PROTEIN 1 promoter or a POLYGALACTURONASE promoter.

7. The transgenic plant of claim 1, wherein the transgenic plant is a tomato plant.

8. Seed produced from the transgenic plant according to claim 1, wherein the seed comprises the recombinant polynucleotide of claim 1.

9. A method for producing a transgenic plant, wherein
(a) a plant cell is genetically modified by integrating into the nuclear genome of said plant cell a recombinant polynucleotide encoding a polypeptide having a conserved domain with at least 80% sequence identity to a conserved domain of amino acid coordinates 135-195 of SEQ ID NO: 84; and
(b) a transgenic plant is generated from the plant cell produced according to step (a);
wherein expression of said polypeptide results in increased levels of leaf chlorophylls, increased levels of leaf carotenoids, increased yield, increased volume, or increased biomass of the transgenic plant in comparison to a wild-type plant of the same species.

10. The method of claim 9, wherein the transgenic plant has greater vegetative yield than the wild-type plant.

11. The method of claim 9, wherein the polypeptide has a conserved domain with at least 85% sequence identity to the conserved domain of amino acid coordinates 135-195 of SEQ ID NO: 84.

12. The method of claim 9, wherein the polypeptide has a conserved domain with at least 88% sequence identity to the conserved domain of amino acid coordinates 135-195 of SEQ ID NO: 84.

13. The method of claim 9, further comprising a constitutive, inducible, or tissue-specific promoter operably linked to said nucleotide sequence.

14. The method of claim 13, wherein the constitutive, inducible, or tissue-specific promoter is a LIPID TRANSFER PROTEIN 1 promoter or a POLYGALACTURONASE promoter.

15. The method of claim 9, wherein the transgenic plant is a tomato plant.

16. The method of claim 9, the method steps further comprising:
(c) selfing or crossing the transgenic plant with itself or another plant, respectively, to produce seed; and
(d) growing a progeny plant from the seed.

17. Seed produced from a transgenic plant produced according to the method of claim 9, wherein the seed comprises the recombinant polynucleotide of claim 9.
